(19) United States
(12) Patent Application Publication
(10) Pub. No.: US 2011/0257034 A1
(43) Pub. Date: Oct. 20, 2011

(54) METHODS FOR IDENTIFYING GENES WHICH PREDICT DISEASE OUTCOME FOR PATIENTS WITH COLON CANCER

(75) Inventors: Francis Barany, New York, NY (US); Owen Parker, Brooklyn, NY (US); Manny D. Bacolod, Roosevelt Island, NY (US); Sarah F. Giardina, New York, NY (US); Yu-wei Cheng, Chicago, IL (US); Daniel A. Notterman, Cranbury, NJ (US); Gunter S. Schemmann, Princeton, NJ (US); Philip B. Paty, New York, NY (US); Monib Zirvi, Monmouth Junction, NJ (US)

(73) Assignees: CORNELL UNIVERSITY, Ithaca, NY (US); THE TRUSTEES OF PRINCETON UNIVERSITY, Princeton, NJ (US); SLOAN-KETTERING INSTITUTE FOR CANCER RESEARCH, New York, NY (US); UNIVERSITY OF MEDICINE AND DENTISTRY OF NEW JERSEY, New Brunswick, NJ (US)

(21) Appl. No.: 13/123,689

(22) PCT Filed: Oct. 13, 2009
(86) PCT No.: PCT/US2009/005573

§ 371 Date: Jun. 29, 2011

Related U.S. Application Data
(60) Provisional application No. 61/104,574, filed on Oct. 10, 2008.

(51) Int. Cl. C40B 30/04; C40B 40/06; G01N 33/53; C40B 40/08; C12Q 1/68; G01N 33/566

(52) U.S. Cl. 506/9; 435/6.1; 435/6.18; 435/6.17; 436/501; 435/6.12; 435/6.11; 435/6.13; 506/17; 506/16

(57) ABSTRACT

Closures for containers and methods for using same are provided. In a general embodiment/the present disclosure provides a closure having a top portion (12), a bottom portion (14) and a side portion (16), an aperture (18) extending though the closure, a projection (20) extending from the closure and at least two rib members (36) on an interior of the projection. The projection may also include a cover (22). In another embodiment, a method for using a closure includes inserting a. spike member into a projection, piercing a membrane that hermetically seals a medical container, pushing rib members within the projection to center the spike member inserted into the projection, and tearing the membrane to create a vent hole in the membrane.

[0001] This application claims the benefit of U.S. Provisional Patent Application Ser. No. 61/104,574 filed Oct. 10, 2008, which is hereby incorporated by reference in its entirety.

[0002] This invention was made with government support under grant numbers P01-CA65930 and HHSN261200700388P, both awarded by the National Cancer Institute. The government has certain rights in this invention.

### FIELD OF THE INVENTION

[0003] The present invention is directed to methods of determining the prognosis of a subject having colon cancer. Collections of genes whose expression levels are informative of colon cancer prognosis are also disclosed.

### BACKGROUND OF THE INVENTION

[0004] Oncologists are often faced with difficult treatment decisions regarding the use of chemotherapy and adjuvant radiation therapy for various tumors. Patients and oncologists are increasingly looking for prognostic indicators to help them make these difficult decisions. Since these treatments have significant toxicity and inherent dangers, it is critical to have means to help determine prognosis and minimize adverse events as a result of over-treating patients who would have fared well without aggressive treatments.

[0005] With the advent of accurate and rapid means to analyze the RNA and DNA found in tumors, diagnostic tests that predict outcome are increasingly utilized in clinical settings to help guide treatment decisions for clinicians. In particular, patients who suffer from breast cancer have recently been able to have their tumors analyzed using molecular genetic techniques to help predict their disease outcome. This initial breast cancer prognostic test consisted of a mutation analysis of a small number of genes including, BRCA1, BRCA2, and BRCA3. Analysis of ErbB2 status has also been helpful in guiding patient treatment with targeted therapies such as Herceptin.

[0006] Although these initial analyses provided some useful information for a subset of breast cancer patients, it did not provide useful prognostic information for the vast majority of patients. Therefore, more recent attempts to provide prognostic information for breast cancer tumors have been based on gene expression patterns of multiple genes.

[0007] Several recent publications report the use of microarray gene expression analysis to characterize tumors such as breast cancers (Golub et al, “Molecular Classification of Cancer: Class Discovery and Class Prediction by Gene Expression Monitoring,” Science, 286(5439):531-537 (1999); Bhattarcharjee et al, “Classification of Human Lung Carcinomas by mRNA Expression Profiling Reveals Distinct Adenocarcinoma Subclasses,” Proceed. Natl. Acad. Sci. U.S.A., 98(24):13790-13795 (2001); Ramaswamy et al, “Multiclass Cancer Diagnosis Using Tumor Gene Expression Signatures,” Proceed. Natl. Acad. Sci. U.S.A., 98(26):15149-15154 (2001); Martin et al, “Linking Gene Expression Patterns to Therapeutic Groups in Breast Cancer,” Cancer Res., 60(8):2232-2238 (2000); West et al, “Predicting the Clinical Status of Human Breast Cancer by Using Gene Expression Profiles,” Proceed. Natl. Acad. Sci. U.S.A., 98(20):11462-11467 (2001)). These studies have shown gene expression patterns specific to breast cancer tumors that may have prognostic value. (Sorlie et al, “Gene Expression Patterns of Breast Carcinomas Distinguish Tumor Subclasses with Clinical Implications,” Proceed. Natl. Acad. Sci. U.S.A., 98(19):10869-10874 (2001); Yan et al, “Dissecting Complex Epigenetic Alterations in Breast Cancer Using CpG Island Microarrays,” Cancer Res., 61(23):8375-8380 (2001); Van De Vijver et al, “A Gene-Expression Signature as a Predictor of Survival in Breast Cancer,” N. Engl. J. Med., 347(25):1999-2009 (2002)). Using similar techniques, commercial products like Oncotype Dx (Genomic Health, Redwood City, Calif.) have been developed, making breast cancer prognosis widely available.

[0008] Similar testing for other cancers, such as colon cancer, are currently not available. This year, over 153,000 new cases of colorectal cancer (CRC) will be diagnosed, and 52,180 patients will die from this disease in the United States. There is an urgent need to improve colorectal cancer prognosis by developing accurate molecular techniques that will complement the clinico-pathology, as well as to identify individuals with early disease.

[0009] The present invention is directed to overcoming these and other deficiencies in the art.

### SUMMARY OF THE INVENTION

[0010] A first aspect of the present invention relates to a method for determining the prognosis of a subject having colon cancer that involves obtaining a biological sample from the subject and detecting expression levels of at least five genes selected from a group of 176 genes informative of colon cancer prognosis. The group of 176 genes informative of colon cancer prognosis includes the following genes: ACSL4, RQCD1, AA058828*, AIP, AKR1A1, AP3D1, ARL2BP, ARL4A, ARL6IP4, OGFOD2, ASNA1, ATP5B, C12orf52, C19orf36, C1GALT1, C1orf144, C5orf23, C6orf15, C7orf10, C8orf70, CALML4, CASP1, CCNA2, CCT2, CDC42BPA, AK023058*, CDR2L, CFB, CHST12, CLN5, CMPK1, CNOT7, CNPY2, COBL, COMMD4, COX5A, CXCL11, CYB561, CYB5B, DAZAP2, DDX23, DENND2A, DENND2D, DHX15, AL359599*, DND1, DOCK9, EGFR, ELP3, ERP29, ETV1, FAM82C, FDFT1, FKBP14, FLJ10357, FRYL, GALNS, GCHFR, GHITM, GLS, GPR177, GRB10, GREM2, GRHPR, GRP, GSR, GSTA1, H2AFZ, HOXB7, IFT88, IL15RA, ISG20, ITGAE, KIAA0746, SERINC2, KIF13B, KLC1, LAMP3, LANCL1, LAP3, LEPREL1, LL22NC03-5H6.5, LOC100131861, SAMM50, LRRC41, LRRC47, MAP4, MAPKAPK5, MCM5, MCRS1, METRN, METTL3, MFHAS1, MMP3, MOSPD1, MRPL46, MTUS1, MYRIP, N4BP2L2, NAB1, NAT1, NDUFC1, NISCH, NUMB, OGT, OSBPL3, PAM, PBK, PDGFA, PEBP1, PGDS, PIGR, PIGT, PRDM2, PRELP, PSMA5, PSMD9, PSPC1, PTHLH, R3HCC1, RP3-377H14.5, RPLP0, RPLP0-like, RPS27L, RTN2, RYK, SAV1, SCAMP1, SERPINA1, SF3B1, SFPQ, SGCD, SLC25A3, SLC39A8, SMG7, SMURF2, SORD, SOX4, SPATA5L1, SQRDL, SRP72, SSNA1, STK3, SYNGR1, TAPBPL, TEGT, TES, TLN1, TMCC1, TMEM106C, TMEM16A, TMEM33, TMEM87A, TNFRSF10B, TNFSF10, TNIK, TRIM36, U2AF2, UBE2L6, UCP2, UNC84A, UQCRFS1, UQCRH, USP12, USP3, VPS41, WARS, WDR1, WDR68, XPO7, YBX1, ZC3H7B, ZMYM2, ZMYM5, ZNF117, and ZNF430. This method further involves comparing the detected expression levels of the at least five genes from the biological sample with the expression levels of the corresponding at least five genes when associated with a good disease prognosis expression profile and when associated with a bad disease prognosis expression profile. Based on that comparison, the prognosis of the subject having colon cancer is determined.

[0011] Another aspect of the present invention relates to a method for determining the prognosis of a subject having colon cancer that involves obtaining a biological sample from the subject and detecting the expression level of at least five genes selected from a group of 101 genes informative of colon cancer prognosis. The group of 101 genes informative of colon cancer prognosis includes the following genes: NARS, WDR1, WARS, CCT4, ATP5B, SORD, UBE2L6, PSME2, AIP, RRM2, LRRC41, CCT2, TAF9, HDAC5, SVIL, CCNB2, DBN1, PBX2, RFC5, IDE, MAD2L1, PSMA4, NDUFC1, IVD, PPIH, NEO1, CXCL10, FXN, GABBR1, ARHGAP8, LOC553158, HOXA4, COMMD4, DFFB, KLF12, GLMN, CASP7, PIR, ATP5G3, ACTN1, DDOST, TAPBP, RGL2, CYB561, TUSC3, C3orf63, GRB10, NR2F1, WDR68, CXCL2, CNPY2, CASP1, INDO, PFKM, CXCL11, MCAM, MAP2K5, MRPS11, NOLC1, CD59, CAMSAP1L1, SHANK2, KLC1, EMP1, C1orf95, GMDS, RPLP0, RPLP0-like, PDLIM4, PAM, TM4SF1, BEX4, ADORA1, FAM48A, ITM2B, PREB, CMPK1, LAP3, FAM82C, AACS, RP5-1077B9.4, NUP37, RHBDF1, PBK, TIPIN, TMEM204, ALG6, NPR3, SCD5, FLJ13236, GPATCH4, GREM2, RPL22, KLHL3, C15orf44, USP3, TNS1, ZBTB20, RTN2, FLJ10357, and CALML4. This method further involves comparing the detected expression levels of the at least five genes from the biological sample with the expression levels of the corresponding at least five genes when associated with a good disease prognosis expression profile and when associated with a bad disease prognosis expression profile. Based on that comparison, the prognosis of the subject having colon cancer is determined.

[0012] The present invention is also directed to a method of identifying an agent that improves the prognosis of a subject having colon cancer. This method involves administering the agent to the subject having colon cancer and obtaining a first biological sample from the subject before said administering and a second biological sample from the subject after said administering. The method further involves detecting the expression levels of at least five genes selected from the group of 176 genes informative of colon cancer prognosis disclosed supra. Determining increases or decreases in the expression levels of the at least five genes in the second sample compared to the first sample identifies an agent that improves the prognosis of a subject having colon cancer.

[0013] Another aspect of the present invention is directed to a collection of 71 genes having expression levels informative for predicting a prognosis of a patient having colon cancer. The collection of 71 genes comprises the following genes: SLC25A3, DAZAP2, TEGT, ERP29, PSMA5, DDX23, LOC100131861, SAMM50, SFPQ, NISCH, CYB5B, TMEM106C, EGFR, MCRS1, SERPINA1, CCNA2, NDUFC1, COX5A, GCHFR, ITGAE, PRDM2, PDGFA, GSR, GRP, COMMD4, XPO7, YBX1, SRP72, UCP2, SLC39A8, NAB1, WDR68, CXCL11, RECQL, CASP1, PTHLH, UNC84A, MTUS1, KIAA0746, SERINC2, DOCK9, FRYL, MAPKAPK5, LRRC47, RQCD1, TNIK, RPLP0, RPLP0-like, CLN5, NAT1, CDC42BPA, GSTA1, ZMYM5, RYK, PIGT, CMPK1, SQRDL, FAM82C, CNOT7, LL22NC03-5H6.5, PSPC1, TAPBPL, METRN, PBK, MRPL46, FKBP14, C1GALT1, GREM2, GPR177, DND1, and PRELP.

[0014] Another aspect of the present invention is related to a collection of 101 genes having expression levels informative for predicting a prognosis of a patient having colon cancer. The collection of 101 genes comprises the following genes: AACS, ACTN1, ADORA1, AIP, ALG6, ARHGAP8, L00553158, ATP5B, ATP5G3, BEX4, C15orf44, C1orf95, C3orf63, CALML4, CAMSAP1L1, CASP1, CASP7, CCNB2, CCT2, CCT4, CD59, CMPK1, CNPY2, COMMD4, CXCL10, CXCL11, CXCL2, CYB561, DBN1, DDOST, DFFB, EMP1, FAM48A, FAM82C, FLJ10357, FLJ13236, FXN, GABBR1, GLMN, GMDS, GPATCH4, GRB10, GREM2, HDAC5, HOXA4, IDE, INDO, ITM2B, IVD, KLC1, KLF12, KLHL3, LAP3, LRRC41, MAD2L1, MAP2K5, MCAM, MRPS11, NARS, NDUFC1, NEO1, NOLC1, NPR3, NR2F1, NUP37, PAM, PBK, PBX2, PDLIM4, PFKM, PIR, PPIH, PREB, PSMA4, PSME2, RFC5, RGL2, RHBDF1, RP5-1077B9.4, RPL22, RPLP0, RPLP0-like, RRM2, RTN2, SCD5, SHANK2, SORD, SVIL, TAF9, TAPBP, TIPIN, TM4SF1, TMEM204, TNS1, TUSC3, UBE2L6, USP3, WARS, WDR1, WDR68, and ZBTB20.

[0015] The current standard of care for colorectal cancer provides the average treatment for the average tumor, with less than average results. Current cancer care over-treats many patients to help an unknown few, with toxic, relatively ineffective, expensive therapeutics. There is an urgent need to develop a means to predict which patients will respond to standard therapies, which patients do not require therapy in addition to surgery, and which patients are likely not to respond to current therapeutics. For every 100 stage 11 and III colon cancer patients on adjuvant therapy, only about 12 of them will respond favorably, about 50 would survive without therapy, and about 38 will experience a recurrence even when given the current treatments. The current invention seeks to help individuals on both sides of this equation by stratifying the risk of a poor outcome. Thus, individuals with low risk tumors, in consultation with their physicians, may opt to avoid unnecessary and debilitating therapy. On the other hand, individuals with high risk tumors may seek to enroll in clinical trials testing the newest therapies to increase their chance of a better outcome.

### BRIEF DESCRIPTION OF THE DRAWINGS

[0016] FIG. 1 is a flow chart outlining methods for determining the prognosis of a subject having colon cancer in accordance with the present invention. Tumor tissue RNA is harvested and converted to cDNA using reverse transcription. The cDNA is then hybridized to an expression array to determine gene expression levels. Tumor tissue DNA is analyzed for microsatellite instability, gene promoter methylation, and mutational status. Data from one or more analyses is used to determine a subject's prognosis and develop a personalized treatment plan.

[0017] FIG. 2 is a flow chart depicting the steps used to identify the 176 and 71 gene predictor sets of the present invention that are useful for predicting disease outcome in subjects having colon cancer.

[0018] FIGS. 3A-3B illustrate how a patient's outcome is determined using the expression levels of the 71, 101, or 176 gene predictor sets of the present invention. FIG. 3A outlines the steps taken to determine, in a sample taken from a patient having colon cancer, the prognosis of that patient based on the expression levels of the genes in the 71-, 101-, or 176 genes sets and FIG. 3B applies the steps outlined in FIG. 3A to three hypothetical samples where the expression levels of six genes were determined.

[0019] FIG. 4 is a scatterplot graphing the predicted outcome for 166 stage I-IV primary colon cancer tumor samples based on gene expression levels of the 71-genes in the 71-gene predictor set. The x-axis depicts the percentage of genes for a given tumor sample that had expression values associated with a bad disease outcome. The y-axis depicts the percentage of genes for a given tumor sample that had expression values associated with a good disease outcome. Tumor samples from patients who died of disease (DOD) (n=56) are represented by (▪), while tumor sample from all other patients who survived or died of other causes (non-DOD) (n=110) are represented by (♦). Samples which binned to Group 1 had good prognosis with only 6% being categorized as DOD. Samples which binned to Group 4 had poor prognosis with 70% being categorized as DOD. Groups 2 and 3 had intermediate prognosis levels.

[0020] FIGS. 5A-5E are scatterplots graphing the predicted outcomes for the 166 stage I-IV primary colon cancer tumor samples based on gene expression levels of the 71-genes in the 71-gene predictor set stratified into high, intermediate, and low risk groups with the stage and recurrence status of the tumor identified. FIG. 5A is the same plot as shown in FIG. 4 with further stratification. The percentage of DOD patients increases steadily in each subgroup from Group 1 (0%) to Group 2A+2B (14%) to Group 3A+3B (42%) to Group 4 (69%) to Group 5+6 (83%). In FIG. 5B, stage I tumors are identified. Most stage I tumors binned to low risk groups 1 and 2A. One recurrence was identified in this group (i.e. stage I tumor) and is noted on the graph (“R68”). The recurrence was detected after 68 months, and, therefore, it is unclear if it is a recurrence or a new tumor. In FIG. 5C, stage II tumors are identified. Stage II tumor samples are spread evenly through the risk groups. Three recurrences were identified and binned to group 3B and the border of group 2A/2B. In FIG. 5D, the stage III tumors are identified. Surprisingly, a number of stage III tumor samples binned to Group 1 showing that analysis of gene expression of the 71-gene predictor set is not simply recapitulating tumor stage. Recurrences in the stage III population of samples were identified in all risk groups. FIG. 5E shows the stage IV tumor samples. These samples binned as predicted, mostly to groups 4-6 (i.e. high risk).

[0021] FIG. 6 is a scatterplot graphing the predicted outcome for the 166 stage I-IV primary colon cancer tumor samples based on gene expression levels of the 1389-genes in the 1389-gene predictor set. The x-axis depicts the percentage of genes for a given tumor sample that had expression values associated with a bad disease outcome. The y-axis depicts the percentage of genes for a given tumor sample that had expression values associated with a good disease outcome. Tumor samples from DOD patients are represented by (▪), while tumor sample from non-DOD patients (n=110) are represented by (♦). The stratification of survival outcome did not improve significantly between the 71 gene set and the 1389 gene set.

[0022] FIG. 7 is a scatterplot graphing the predicted outcome for the 166 stage I-IV primary colon cancer tumor samples based on gene expression levels of the 101 genes in the 101-gene predictor set ranked by the odds ratio analysis. The x-axis depicts the percentage of genes for a given tumor sample that had expression values associated with a bad disease outcome. The y-axis depicts the percentage of genes for a given tumor sample that had expression values associated with a good disease outcome. Tumor samples from DOD patients are represented by (▪), while tumor sample from non-DOD patients (n=110) are represented by (♦). The low risk category can be segregated from the intermediate and high risk categories by the lines indicated on the graph.

[0023] FIG. 8 is a scatterplot graphing the predicted outcome for the 166 stage I-IV primary colon cancer tumor samples based on gene expression levels of the 101 genes in the 101-gene predictor set ranked by difference scores. The x-axis depicts the percentage of genes for a given tumor sample that had expression values associated with a bad disease outcome. The y-axis depicts the percentage of genes for a given tumor sample that had expression values associated with a good disease outcome. Tumor samples from DOD patients are represented by (▪), while tumor sample from non-DOD patients (n=110) are represented by (♦). The low risk category had 2% of patients who were in the DOD category. The high risk group by contrast had 87% of patients in the DOD category. The intermediate risk had 56% of patients in the DOD category.

[0024] FIG. 9 is a scatterplot graphing the predicted outcome for the 166 stage I-IV primary colon cancer tumor samples based on gene expression levels of the 71 genes in the 71-gene predictor set as shown in FIG. 4 with LRAT methylation status of various samples identified (see arrows). Several DOD samples that had binned to group 1 based on gene expression levels had low to no LRAT methylation, which predicts poor prognosis. Removing these samples from group 1 based on LRAT methylation status improved the performance of the prognosis prediction in the low risk category. The low risk category in this analysis only had 3% of patients in the DOD category.

[0025] FIG. 10 is a scatterplot graphing the predicted outcome for the 166 stage I-IV primary colon cancer tumor samples based on gene expression levels of the 71 genes in the 71-gene predictor set stratified into high, intermediate, and low risk groups. The LRAT methylation status of various samples is also identified. As in FIG. 9, when LRAT methylation status was included in the analysis, the low risk groups had excellent prediction of good outcome. Group 1 does not contain patients with DOD status while Group 2A+2B only has 6% of patients with DOD status.

[0026] FIG. 11 is a scatterplot graphing the predicted outcome for the 166 stage I-IV primary colon cancer tumor samples based on gene expression levels of the 101 genes in the 101-gene predictor set ranked by difference score. The LRAT methylation status of various samples is also identified. The x-axis depicts the percentage of genes for a given tumor sample that had expression values associated with a bad disease outcome. The y-axis depicts the percentage of genes for a given tumor sample that had expression values associated with a good disease outcome. Tumor samples from DOD patients are represented by (▪), while tumor sample from non-DOD patients (n=110) are represented by (♦). Inclusion of LRAT methylation status was useful to reclassify some patient outcomes in this example as well.

[0027] FIG. 12 is the overall view of gene expression dysregulation in regions of chromosomal aberrations. Shown are the percentages of samples with copy number gains (top chart), copy number losses (middle chart), and copy neutral-LOH events (bottom chart) in every autosomal chromosome. Each circle represents a gene located in the region of aberration, and whose colon cancer expression is at least 3 standard deviation units above (red) or below (green) the baseline (normal mucosa samples) for at least 10% of the colon cancer samples. As evident in the population of the colored circles, there are more upregulated genes in regions of gains, and more downregulated genes in regions of losses.

[0028] FIG. 13 is a numerical representation of FIG. 12. It shows the percentages of genes that have: a) gained copy number and increased expression level (red bar), b) lost copy number and decreased expression level (green bar), c) gained copy number and decreased expression level (gray bar, pointing down), and d) lost copy number and increased expression level (gray bar, pointing up). The percentages are calculated based on the number of unique genes in every chromosome arm. As shown in this chart, chromosome arms 7p, 7q, 8q, 13q, 20p, and 20q have high proportion of upregulated genes. On the other hand, 1p, 4q, 8p, 14q, 15q, 17p, 18p, and 18q have high proportion of downregulated genes.

[0029] FIG. 14 shows genes that have dysregulated expression on chromosome 8. In general, genes which are upregulated correlate with regions of copy number gain and genes which are downregulated correlate with regions of copy number loss. The 8q arm, containing numerous regions of gain, includes the genes NCO6AIP (or TGS1), CHD7, DPY19L4, LAPTM4B, PABPC3, SLC25A32, and EIF2C2 which all have elevated expression. The 8p arm, containing numerous regions of loss, includes the highly downregulated genes MTUS1, ADAMEC1, EPHX2, TMEM64, and PPP2CB.

[0030] FIG. 15 is a graph summarizing the Kaplan-Meier (KM) survival curve analyses done for the most highly dysregulated genes in the widely recognized aneuploidy regions in colorectal cancer. Shown are the percentages (fractions indicated on each bar) of the most highly dysregulated genes in chromosomes 7, 8p, 13q, 17p, 18, 20p, and 20q where expression levels are concordant (red for the gained and green for the lost arms) or discordant (gray bars) with prognosis.

[0031] FIGS. 16A-16J are Kaplan-Meier survival curves for 10 of the 13 most dysregulated genes on chromosomal arm 8p. Included in each graph is the Affymetrix probe identifier, gene name, and chromosome location. In each case, lower expression (shown in red) correlated with worse outcome, consistent with chromosomal loss contributing to bad prognosis. Higher expression is shown in green.

[0032] FIGS. 17A-17B show the distribution of the 71 gene set among different autosomal chromosomal arms. FIG. 17A shows chromosomes 1-7, while FIG. 17B shows chromosomes 8-22 and X. In general, the expression pattern of the 71 gene set followed the pattern of chromosomal copy number dysregulation observed in the colon tumors analyzed. The number of dysregulated genes in each chromosomal arm predicting outcome based on expression is indicated. Copy loss (green), gain (red), and copy neutral LOH (yellow) are demonstrated across the chromosomal arms.

[0033] FIGS. 18A-18B show the distribution of the 176 gene set among different chromosomal arms. FIG. 18A shows chromosomes 1-7, while FIG. 18B shows chromosomes 8-22 and X. In general, the expression pattern of the 176 gene set followed the pattern of chromosomal copy number dysregulation observed in the colon tumors analyzed. The number of dysregulated genes in each chromosomal arm predicting outcome based on expression is indicated. Copy loss (green), gain (red), and copy neutral LOH (yellow) are demonstrated across the chromosomal arms.

[0034] FIG. 19 is the Kaplan-Meier survival curve for Caspase 1, one of the genes of the 71 gene predictor set. The red line indicates survival for patients having tumors where the expression of Caspase 1 is in the top third of average tumor expression. The green line indicates survival for patients having tumors where the expression of Caspase 1 is in the middle third of average tumor expression. The blue line indicates survival for patients having tumors where the expression of Caspase 1 is in the bottom third of average tumor expression. When the expression level of Caspase 1 is in the top third of average tumor expression a favorable prognosis is predicted and when the expression level is in the bottom third of average tumor expression an unfavorable prognosis is predicted.

[0035] FIG. 20 is a Kaplan-Meier survival curve for the TMEM106C gene showing a skewed distribution. When TMEM106C gene expression is in the lower third, relative to the average tumor expression level, a bad prognosis is predicted as indicated by the low percentage of survival in the KM curve (blue line). The percent survival was the same for tumors having average (middle third, green line) and above average (top third, red line) TMEM106C expression. Based on this analysis, this transmembrane protein is believed to have an important role in tumor progression.

[0036] FIG. 21 is a schematic diagram of enzymes and protein factors involved in retinol metabolism.

[0037] FIGS. 22A-22B show the LRAT methylation status for 69 samples that were classified as having microsatellite instability by either the three marker criteria (FIG. 22A) or the NCI criteria (FIG. 22B).

[0038] FIG. 23 shows the disease specific Kaplan-Meier survival analysis for LRAT methylation status. Only CRC tumor samples of all four clinical stages which were MSS (Microsatellite stable) were included in the survival analysis. The log-rank test shows a chi-square=4.73 and p-value=0.0296.

[0039] FIG. 24 shows the disease specific Kaplan-Meier survival analysis for LRAT methylation status. CRC tumor samples of all four clinical stages were included in the survival analysis. The log-rank test shows a chi-square=4.73 and p-value=0.0296.

[0040] FIG. 25 shows the disease specific Kaplan-Meier survival analysis for LRAT methylation status and retinoic acid receptor-β(RAR-β) methylation status. CRC tumor samples of all four clinical stages were included in the survival analysis.

[0041] FIG. 26 is a scatterplot graphing the predicted outcome for 22 additional primary colon tumor samples from patients that were not included in the original analysis of the 166 tumor set. There was excellent correlation between the predicted outcome and survival for samples in Group 1 as illustrated by the lack of samples from patients who DOD binning to Group 1.

[0042] FIG. 27 is a scatterplot graphing the predicted outcome for 36 liver metastases specimens generated using the 71 gene predictor set of the present invention. This analysis was performed to validate the 71 gene set on more advanced tumor samples. As shown, the vast majority of these specimens which included many that had DOD status binned to Group 4.

[0043] FIG. 28 is a scatterplot graphing the predicted outcome for 19 lung metastases specimens generated using the 71 gene predictor set of the present invention. This analysis was done to validate the 71 gene set on more advanced tumor samples. As shown, the vast majority of these specimens which included many that had DOD status binned to Group 4.

[0044] FIG. 29 is a scatterplot graphing the predicted outcome for 46 large primary adenoma specimens generated using the 71 gene predictor set of the present invention. The adenoma expression profiles in general predicted a low risk as most samples binned to Group 1. The few samples that did have DOD status also have either a synchronous primary tumor or synchronous metastases. It is important to note that the gene expression profiles of the primary colon tumors or metastatic tumors, in general predicted a poor outcome for survival as seen in the previous figures.

[0045] FIG. 30 is a scatterplot graphing the predicted outcome for 48 mucosa samples taken adjacent to a primary tumor sample. There are some mucosal samples, in which the results of this analysis may predict a poor outcome as a result of a field effect for genes that are dysregulated in the mucosa prior to the onset of a primary colon carcinoma.

[0046] FIG. 31 is a scatterplot graphing the predicted outcome for both normal mucosa and matched adjacent primary colon tumors. In this figure each matched pair is labeled with the same letter. The normal mucosa is marked in green and the tumor samples are marked in red. In general, the normal mucosa samples predict a better outcome in each case than the matched tumors. Also some tumors show greater changes in their expression profiles than others. This distribution may be a result of a combination of genes predisposing to the development of tumors, as well as, genes that contribute to poor outcome once a primary tumor has become aggressive and metastatic.

### DETAILED DESCRIPTION OF THE INVENTION

[0047] The present invention relates generally to methods of determining the prognosis of a subject having colon cancer. In a first aspect of the present invention, the method for determining the prognosis of a subject having colon cancer involves obtaining a biological sample from the subject and detecting expression levels of at least five genes selected from the group of 176 genes informative of colon cancer prognosis. The group of 176 genes informative of colon cancer prognosis includes the following genes: ACSL4, RQCD1, AA058828*, AIP, AKR1A1, AP3D1, ARL2BP, ARL4A, ARL6IP4, OGFOD2, ASNA1, ATP5B, C12orf52, C19orf36, C1GALT1, C1orf144, C5orf23, C6orf15, C7orf10, C8orf70, CALML4, CASP1, CCNA2, CCT2, CDC42BPA, AK023058*, CDR2L, CFB, CHST12, CLN5, CMPK1, CNOT7, CNPY2, COBL, COMMD4, COX5A, CXCL11, CYB561, CYB5B, DAZAP2, DDX23, DENND2A, DENND2D, DHX15, AL359599*, DND1, DOCK9, EGFR, ELP3, ERP29, ETV1, FAM82C, FDFT1, FKBP14, FLJ10357, FRYL, GALNS, GCHFR, GHITM, GLS, GPR177, GRB10, GREM2, GRHPR, GRP, GSR, GSTA1, H2AFZ, HOXB7, IFT88, IL15RA, ISG20, ITGAE, KIAA0746, SERINC2, KIF13B, KLC1, LAMP3, LANCL1, LAP3, LEPREL1, LL22NC03-5H6.5, LOC100131861, SAMM50, LRRC41, LRRC47, MAP4, MAPKAPK5, MCM5, MCRS1, METRN, METTL3, MFHAS1, MMP3, MOSPD1, MRPL46, MTUS1, MYRIP, N4BP2L2, NAB1, NAT1, NDUFC1, NISCH, NUMB, OGT, OSBPL3, PAM, PBK, PDGFA, PEBP1, PGDS, PIGR, PIGT, PRDM2, PRELP, PSMA5, PSMD9, PSPC1, PTHLH, R3HCC1, RP3-377H14.5, RPLP0, RPLP0-like, RPS27L, RTN2, RYK, SAV1, SCAMP1, SERPINA1, SF3B1, SFPQ, SGCD, SLC25A3, SLC39A8, SMG7, SMURF2, SORD, SOX4, SPATA5L1, SQRDL, SRP72, SSNA1, STK3, SYNGR1, TAPBPL, TEGT, TES, TLN1, TMCC1, TMEM106C, TMEM16A, TMEM33, TMEM87A, TNFRSF10B, TNFSF10, TNIK, TRIM36, U2AF2, UBE2L6, UCP2, UNC84A, UQCRFS1, UQCRH, USP12, USP3, VPS41, WARS, WDR1, WDR68, XPO7, YBX1, ZC3H7B, ZMYM2, ZMYM5, ZNF117, and ZNF430. This method further involves comparing the detected expression levels of the at least five genes from the biological sample with the expression levels of the corresponding at least five genes when associated with a good disease prognosis expression profile and when associated with a bad disease prognosis expression profile. Based on that comparison, the prognosis of the subject having colon cancer is determined.

[0048] In a preferred embodiment of this aspect of the present invention, the at least five genes are selected from a group of 71 genes informative of colon cancer prognosis. This group of 71 genes is a subset of the 176 genes informative of colon cancer prognosis and includes the following genes, SLC25A3, DAZAP2, TEGT, ERP29, PSMA5, DDX23, LOC100131861, SAMM50, SFPQ, NISCH, CYB5B, TMEM106C, EGFR, MCRS1, SERPINA1, CCNA2, NDUFC1, COX5A, GCHFR, ITGAE, PRDM2, PDGFA, GSR, GRP, COMMD4, XPO7, YBX1, SRP72, UCP2, SLC39A8, NAB1, WDR68, CXCL11, RECQL, CASP1, PTHLH, UNC84A, MTUS1, KIAA0746, SERINC2, DOCKS, FRYL, MAPKAPK5, LRRC47, RQCD1, TNIK, RPLP0, RPLP0-like, CLN5, NAT1, CDC42BPA, GSTA1, ZMYM5, RYK, PIGT, CMPK1, SQRDL, FAM82C, CNOT7, LL22NC03-5H6.5, PSPC1, TAPBPL, METRN, PBK, MRPL46, FKBP14, C1GALT1, GREM2, GPR177, DND1, and PRELP.

[0049] As described in greater detail in the Examples below, the 176- and 71-genes, whose expression levels are informative for predicting colon cancer outcome were derived from a larger pool of 383 genes. Kaplan-Meier (KM) survival curves were generated for the 383-genes and genes having p-values of >0.02 were removed from further analysis. The remaining group of 176 genes was further narrowed to 71 genes by removing genes having p-values associated with the KM curves of >0.0125 (See FIG. 2). Although a preferred embodiment of the invention, involves determining the prognosis of a subject having colon cancer by detecting the expression levels of at least five genes selected from the group of 176 or 71 genes, the expression levels of any five of the 383 genes also provides valuable prognostic information. The 383 genes, including the 176- and 71-genes whose expression levels are informative for the prediction of colon cancer are listed in Table 1, by gene symbol, alternative gene name(s), and Genbank Accession Number. The nucleotide sequences of the Affymetrix probes used to identify and quantify gene expression levels are also provided.

TABLE 1
383 Genes Informative of Colon Cancer Prognosis

| | Gene | | | Accession # | |
|---|---|---|---|---|---|
| Probe Set | Symbol | | | (Entrez Gene | |
| ID | (*identifier) | AKA | Gene Title | ID) | Probe Sequence(s) |
| 222033_s_at | AA058828* | | | | TAACAAAGAACGAGCACTTCCTTTC (SEQ ID NO: 1) |
| | | | | | GCACTTCCTTTCAGAGTTTCTGAGA (SEQ ID NO: 2) |
| | | | | | GGAACAGTCTGGGTGGAATGGGGCT (SEQ ID NO: 3) |
| | | | | | GGGGCTGAAACCATGTGCAAGTCTG (SEQ ID NO: 4) |
| | | | | | GAGATGTTAATTTTAGGGACCCGTG (SEQ ID NO: 5) |
| | | | | | TGTTTCCTAGCCCACAAGAATGCAA (SEQ ID NO: 6) |
| | | | | | AACAGATACTCGCTAGCCTCATTTA (SEQ ID NO: 7) |
| | | | | | AAAGGAGGAGTGCATCTTTGGCCGA (SEQ ID NO: 8) |
| | | | | | GCATCTTTGGCCGACAGTGGTGTAA (SEQ ID NO: 9) |
| | | | | | GGTTTGGTCCTATATTTCTAGTCAT (SEQ ID NO: 10) |
| | | | | | GTATTTTGTATACCATCTTCATATA (SEQ ID NO: 11) |
| 63825_at | ABHD2 | HS1-2, LABH2, | abhydrolase domain | 11057 | TGAAGTGCAACTGAAAGCTGCTAGT (SEQ ID NO: 12) |
| | | MGC111112, | containing 2 | | ACTGAAAGCTGCTAGTGATGATCTG (SEQ ID NO: 13) |
| | | MGC26249, | | | CTGAAAGCTGCTAGTGATGATCTGG (SEQ ID NO: 14) |
| | | PHPS1-2 | | | GTAATATACAATTTGTCCAGTAGCC (SEQ ID NO: 15) |
| | | | | | AATATACAATTTGTCCAGTAGCCAG (SEQ ID NO: 16) |
| | | | | | AATTTGTCCAGTAGCCAGTTTGTTT (SEQ ID NO: 17) |
| | | | | | AATGGTCACCGCAGGCCATACTACC (SEQ ID NO: 18) |
| | | | | | TCACCGCAGGCCATACTACCAATGA (SEQ ID NO: 19) |
| | | | | | CCATACTACCAATGAAATGGTAGGT (SEQ ID NO: 20) |
| | | | | | GAAATAGCACTCTGCATGCTTTGCT (SEQ ID NO: 21) |
| | | | | | AGCACTCTGCATGCTTTGCTCTACA (SEQ ID NO: 22) |
| | | | | | GCACTCTGCATGCTTTGCTCTACAA (SEQ ID NO: 23) |
| | | | | | CACTCTGCATGCTTTGCTCTACAAG (SEQ ID NO: 24) |
| | | | | | ACTCTGCATGCTTTGCTCTACAAGA (SEQ ID NO: 25) |
| | | | | | CTCTGCATGCTTTGCTCTACAAGAT (SEQ ID NO: 26) |
| | | | | | TCTGCATGCTTTGCTCTACAAGATG (SEQ ID NO: 27) |
| 202422_s_at | ACSL4 | ACS4, FACL4, | acyl-CoA synthetase | 2182 | ATTTTGATCTCACATTTTTATACCT (SEQ ID NO: 28) |
| | | LACS4, MRX63, | long-chain family | | AAATTGCTCACAGTTATTACATACA (SEQ ID NO: 29) |
| | | MRX68 | member 4 | | ATTACATACACATCAGCCATCAACT (SEQ ID NO: 30) |
| | | | | | ACACATCAGCCATCAACTAAAGTTG (SEQ ID NO: 31) |
| | | | | | ACTACAATATGTACATTTCTAAGTC (SEQ ID NO: 32) |
| | | | | | CTTTTGCTTTAATTCCATGAATGTT (SEQ ID NO: 33) |
| | | | | | ATGTTTCTTTGATCATGAATAACTG (SEQ ID NO: 34) |
| | | | | | GTAAGTCTTGCCTATATTTTCCTGA (SEQ ID NO: 35) |
| | | | | | TATTTTCCTGATAGCATATGACAAA (SEQ ID NO: 36) |
| | | | | | TATTCATATTTGTACTTTCTGTTAA (SEQ ID NO: 37) |
| | | | | | GTTTTTAAGTTTGCACTCAAATCTT (SEQ ID NO: 38) |
| 201782_s_at | AIP | ARA9, FKBP16, | aryl hydrocarbon | 9049 | GTGCCACTTATCCACCAGGAGGGCA (SEQ ID NO: 39) |
| | | FKBP37, | receptor interacting | | AGGAGGCTGCTGCCAAGTACTACGA (SEQ ID NO: 40) |
| | | SMTPHN, XAP2 | protein | | CAAGTACTACGATGCCATTGCCTGC (SEQ ID NO: 41) |
| | | | | | CATTGCCTGCCTCAAGAACCTGCAG (SEQ ID NO: 42) |
| | | | | | CCTGGGTCCCCTGAATGGATCCAGC (SEQ ID NO: 43) |
| | | | | | GAGGAGTACTACGAGGTGCTGGACC (SEQ ID NO: 44) |
| | | | | | GTCAAGGCCTACTTCAAGCGGGGCA (SEQ ID NO: 45) |
| | | | | | CGGCCGTGTGGAATGCCCAGGAGGC (SEQ ID NO: 46) |
| | | | | | GCCTGTGGTGAGCCGAGAGCTGCGG (SEQ ID NO: 47) |
| | | | | | CCTGGAGGCACGGATCCGGCAGAAG (SEQ ID NO: 48) |
| | | | | | GGGATCTTCTCCCATTGACAGGAGC [(SEQ ID NO: 49) |
| 222159_at | AK023058 | | CDNA FLJ12996 fis, | | TAGGAAATCCAGCAATCCTGGCCCC (SEQ ID NO: 50) |
| | | | clone | | CAGAAGTTCCCCCTAAGAACCACTG (SEQ ID NO: 51) |
| | | | NT2RP3000235 | | AAGGGGAGCCTCCTATGAGAATTCC (SEQ ID NO: 52) |
| | | | | | ATGAGAATTCCCCTAGTGATTCCCT (SEQ ID NO: 53) |
| | | | | | TGATTCCCTGTGGAGGTGGTTCCCA (SEQ ID NO: 54) |
| | | | | | AGGCTCATCTGCCCGAGGAGAGAAG (SEQ ID NO: 55) |
| | | | | | GAGGAGATTGGCACAGTGGGGTGGC (SEQ ID NO: 56) |
| | | | | | ATCAGCATCTAGTCATGGAGCTCCA (SEQ ID NO: 57) |
| | | | | | ATAAATCAATCTGTCTTTCTCACTG (SEQ ID NO: 58) |
| | | | | | AAGCAACATGGCATTCACGCAGGGC (SEQ ID NO: 59) |
| | | | | | GGCATTCACGCAGGGCCTGGTAATG (SEQ ID NO: 60) |
| 201900_s_at | AKR1A1 | ALDR1, ALR, | aldo-keto reductase | 10327 | GCCTGTCCAACTTCAACAGTCGGCA (SEQ ID NO: 61) |
| | | ARM, DD3, | family 1, member A1 | | TGATGACATACTCAGTGTGGCCTCC (SEQ ID NO: 62) |
| | | MGC12529, | (aldehyde reductase) | | GTAACTGCTTATAGCCCTTTGGGCT (SEQ ID NO: 63) |
| | | MGC1380 | | | CGTGCATGGCGTGATCCTGATGAGC (SEQ ID NO: 64) |
| | | | | | GAAAAGTATGGCCGATCTCCAGCTC (SEQ ID NO: 65) |
| | | | | | AGCGGAAAGTGATCTGCATCCCCAA (SEQ ID NO: 66) |
| | | | | | CTCCTTCTCGAATCCTTCAGAACAT (SEQ ID NO: 67) |
| | | | | | TTGACTTCACCTTTAGCCCAGAAGA (SEQ ID NO: 68) |
| | | | | | ATATTGTGCCTATGCTTACGGTGGA (SEQ ID NO: 69) |
| | | | | | TGTACCCCTTTAATGACCCGTACTG (SEQ ID NO: 70) |
| | | | | | CAGCTCTGCAGCTAATGAGGTCCTG (SEQ ID NO: 71) |
| 215828_at | AL359599* | | MRNA; cDNA | | CAATTAAACTTTTCTGCTTGCTCTC (SEQ ID NO: 72) |
| | | | DKFZp547C126 | | AATGATCTGGTCTGCTGGAAGGTGG (SEQ ID NO: 73) |
| | | | (from clone | | TGGGCAGTGGGTTGAGCGTGCAGCC (SEQ ID NO: 74) |
| | | | DKFZp547C126) | | GACTTGCACCTTTTCAGCAGTTATC (SEQ ID NO: 75) |
| | | | | | CAGCAGTTATCTAGACCTGGCCGCA (SEQ ID NO: 76) |
| | | | | | CCGCAGTGGCCTGAGTTGCAGTGAT (SEQ ID NO: 77) |
| | | | | | GATTCGTATTCACTCATTCTTTGAT (SEQ ID NO: 78) |
| | | | | | AGGGTTTTGTGCGTGTTGTTTCAGC (SEQ ID NO: 79) |
| | | | | | TATGACACGTGGCACCAGCTGTACA (SEQ ID NO: 80) |
| | | | | | TGCCCTTCTGGTTAGTGTTGTTCTT (SEQ ID NO: 81) |
| | | | | | GAAGCATTGATACTGTGGCCACTCA (SEQ ID NO: 82) |
| 222108_at | AMIGO2 | ALI1, DEGA | adhesion molecule | 347902 | TATTCAGCCAAAATTACCGTTTTAG (SEQ ID NO: 83) |
| | | | with Ig-like domain 2 | | AATGCCACATCCTATATGGTGTTAT (SEQ ID NO: 84) |
| | | | | | GAAAGTACATTTGTTTGCCTGTCTT (SEQ ID NO: 85) |
| | | | | | TTCATTTTGTACATTCTTCCCATTC (SEQ ID NO: 86) |
| | | | | | AAGTCATCATAATTTGTTGCCATAA (SEQ ID NO: 87) |
| | | | | | GAGTAACTTCTTAAATCCCTGTTCT (SEQ ID NO: 88) |
| | | | | | AAATCCCTGTTCTAGCAAACTAATA (SEQ ID NO: 89) |
| | | | | | ATATTGGTTCATGTGCTTGTGTATA (SEQ ID NO: 90) |
| | | | | | AATAGACCCTACTGTACTGTGCTTT (SEQ ID NO: 91) |
| | | | | | ACTGTACTGTGCTTTGGACATTTGA (SEQ ID NO: 92) |
| | | | | | TCACTGGACCGACGTTTTAACAACG (SEQ ID NO: 93) |
| 220144_s_at | ANKRD5 | RP5-839B4.5, | ankyrin repeat | 63926 | GATACCTTGGGTTGAATACACTTTT (SEQ ID NO: 94) |
| | | FLJ21669, | domain 5 | | GAATACACTTTTAACAGCCCTAGAT (SEQ ID NO: 95) |
| | | dJ839B4.6 | | | TAACAGCCCTAGATCGATAGCCCTA (SEQ ID NO: 96) |
| | | | | | GCCCTAGCCCTAGATAGATAGCCCT (SEQ ID NO: 97) |
| | | | | | AGATAGCCCTAGCCCTAGATAGATA (SEQ ID NO: 98) |
| | | | | | GTTTACATAATTTTGGGCCCCAGAT (SEQ ID NO: 99) |
| | | | | | GGCCCCAGATGGTTAAGTGCTAAAT (SEQ ID NO: 100) |
| | | | | | GGGTAGGCTATCAGGAAGTGCAGGC (SEQ ID NO: 101) |
| | | | | | GGCTGGAAACATGCAGGAGCTGTCC (SEQ ID NO: 102) |
| | | | | | GTCCACAAGTGGAATTTCTTCTTCA (SEQ ID NO: 103) |
| | | | | | GAAACCTCAGTTTTGTTCATACACC (SEQ ID NO: 104) |
| 210974_s_at | AP3D1 | ADTD, hBLVR | adaptor-related | 8943 | CGTGGCCATCCGCGTGAAGGCCATC (SEQ ID NO: 105) |
| | | | protein complex 3, | | TGTCTGCGCTGCTTGACAGTGCACA (SEQ ID NO: 106) |
| | | | delta 1 subunit | | GCAGCACCCAGCGGAACGGGATCTG (SEQ ID NO: 107) |
| | | | | | GCGGAACGGGATCTGTGAGGTGCTG (SEQ ID NO: 108) |
| | | | | | GGATCTGTGAGGTGCTGTACGCTGC (SEQ ID NO: 109) |
| | | | | | CTGCGGGGAGTTCTCAGAGCATCTG (SEQ ID NO: 110) |
| | | | | | CAGGCCGTGTATGTGCAGAACGTGG (SEQ ID NO: 111) |
| | | | | | CAGAACGTGGTCAAGCTCTACGCCT (SEQ ID NO: 112) |
| | | | | | AGTTTGTGCAGAGCGCAGACCTGGA (SEQ ID NO: 113) |
| | | | | | GAAGCTTCAGGCCAAGGACGTGCCT (SEQ ID NO: 114) |
| | | | | | GGCCAAGGACGTGCCTGTGGCAGAG (SEQ ID NO: 115) |
| 205980_s_at | ARHGAP8 | BPGAP1, | Rho GTPase | 23779 | GCCTGTGTCTTCGGGCTGAATTTGA (SEQ ID NO: 116) |
| | /// | FLJ20185, | activating protein 8 /// | 553158 | GTGTCTTCGGGCTGAATTTGATCTG (SEQ ID NO: 117) |
| | LOC553158 | PP610 /// | PRR5-ARHGAP8 | 55615 | TGAATTTGATCTGGCCATCCCAGGG (SEQ ID NO: 118) |
| | /// PRR5 | LOC553158; | fusion /// proline rich | | AGTCCCCTGATGGCAGCCAGAAGAC (SEQ ID NO: 119) |
| | | ARHGAP8 /// | 5 (renal) | | TGATGGCAGCCAGAAGACGTCTCTA (SEQ ID NO: 120) |
| | | ARHGAP8, | | | GGCAGCCAGAAGACGTCTCTAGTGT (SEQ ID NO: 121) |
| | | FLJ20185, | | | GCCAGAAGACGTCTCTAGTGTTGCG (SEQ ID NO: 122) |
| | | PP610, | | | GAAGACGTCTCTAGTGTTGCGAACA (SEQ ID NO: 123) |
| | | PROTOR1 | | | GTCTCTAGTGTTGCGAACACTCTGT (SEQ ID NO: 124) |
| | | | | | TGTGCACTTGTATGTTTTGTAAACT (SEQ ID NO: 125) |
| | | | | | TTGTAAACTTGGCATCTGTAAAAAT (SEQ ID NO: 126) |
| 202091_at | ARL2BP | BART1 | ADP-ribosylation | 23568 | TTTTCTGCTCTGTAGTCCAAAAACA (SEQ ID NO: 127) |
| | | | factor-like 2 binding | | GCATGTCGAATATGTCACCAGCCAC (SEQ ID NO: 128) |
| | | | protein | | CAGCCACTTCATCCTTATGGTGCTG (SEQ ID NO: 129) |
| | | | | | GAAGGCTGCCATGTTGAACTCAGGA (SEQ ID NO: 130) |
| | | | | | TCAAACTCCAGGTAGTACTTGTCCA (SEQ ID NO: 131) |
| | | | | | AGTACTTGTCCATGAAATTTCTCTG (SEQ ID NO: 132) |
| | | | | | TCGTCATCCATGATAATGTCCTCTA (SEQ ID NO: 133) |
| | | | | | ATATCCAACCACAGCATCAAATTCT (SEQ ID NO: 134) |
| | | | | | GAAAGACAGCGCAAAGCTCTCTCCT (SEQ ID NO: 135) |
| | | | | | TTCTAAGGCGTCCATCGCAGTCGCC (SEQ ID NO: 136) |
| | | | | | GGTTAAGGCCTCTCAGCCAAGGCCG (SEQ ID NO: 137) |
| 205020_s_at | ARL4A | ARL4 | ADP-ribosylation | 10124 | GGGAGTCCCTGTACTTATAGTTGCT (SEQ ID NO: 138) |
| | | | factor-like 4A | | GAGGAACTCATTGTCACTTTCAGAA (SEQ ID NO: 139) |
| | | | | | GGTGAACTGAGCTCATCAACTCCTT (SEQ ID NO: 140) |
| | | | | | CAACTCCTTGGCATTTGCAGCCTAC (SEQ ID NO: 141) |
| | | | | | TGCAGCCTACCTGTGCAATCATAGG (SEQ ID NO: 142) |
| | | | | | GGAGTAGGTTTTCTCTGGTCTGATT (SEQ ID NO: 143) |
| | | | | | TCTGCCCTCCTGGATGCTATTAAAG (SEQ ID NO: 144) |
| | | | | | GAACAATCAGATGCCCAACTCTGTT (SEQ ID NO: 145) |
| | | | | | CCAACTCTGTTGCCTTGTGGAAGAT (SEQ ID NO: 146) |
| | | | | | GTGCTTCTTAAAGTGGTCTCTTCTC (SEQ ID NO: 147) |
| | | | | | TTGGTACTACCATTTGGGGAAGCCA (SEQ ID NO: 148) |
| 220597_s_at | ARL6IP4 /// | MGC814, SR- | ADP-ribosylation-like | 51329 | CTTCCTCCAGTGATGGCCGGAAGAA (SEQ ID NO: 149) |
| | OGFOD2 | 25, SRp25 /// | factor 6 interacting | 79676 | GTGATGGCCGGAAGAAGCGGGGGAA (SEQ ID NO: 150) |
| | | DKFZp686H15154, | protein 4 /// 2- | | GAAGCGGGGGAAGTACAAGGACAAG (SEQ ID NO: 151) |
| | | FLJ13491, | oxoglutarate and | | GGCAAGGAGAAGGCGGAAGCACAGC (SEQ ID NO: 152) |
| | | FLJ37501, | iron-dependent | | GGGCGCACCAGGCTTATTAAGGGAG (SEQ ID NO: 153) |
| | | MGC120434, | oxygenase domain | | CGCACCAGGCTTATTAAGGGAGATG (SEQ ID NO: 154) |
| | | MGC120436 | containing 2 | | GATGGCGAGGTCCTAGAGGAAATCG (SEQ ID NO: 155) |
| | | | | | AGGGTGCCAGTGGGAAGCCTGATGG (SEQ ID NO: 156) |
| | | | | | GCCAGTGGGAAGCCTGATGGGTGCT (SEQ ID NO: 157) |
| | | | | | GTGGGAAGCCTGATGGGTGCTGGTG (SEQ ID NO: 158) |
| | | | | | GGAAGCCTGATGGGTGCTGGTGGCC (SEQ ID NO: 159) |
| 217852_s_at | ARL8B | ARL10C, | ADP-ribosylation | 55207 | TGAAGCATGTTGCATACTACCCTGG (SEQ ID NO: 160) |
| | | FLJ10702, Gie1 | factor-like 8B | | TAAACTTGCTACTGTTGTTCAACAC (SEQ ID NO: 161) |
| | | | | | GAATGTGGCAACTTGCTTGTGCCTA (SEQ ID NO: 162) |
| | | | | | GACTCTGTGGGGACTGCATAGGTTT (SEQ ID NO: 163) |
| | | | | | TGTGTCTATACATTGCTTTCCGCAT (SEQ ID NO: 164) |
| | | | | | TGCTTTCCGCATTTCAAGACATCCA (SEQ ID NO: 165) |
| | | | | | AAGACATCCAGACGCTATTACCAAC (SEQ ID NO: 166) |
| | | | | | GACGCTATTACCAACATTTTCCTGT (SEQ ID NO: 167) |
| | | | | | ACATTTTCCTGTGCATTAACCTCTG (SEQ ID NO: 168) |
| | | | | | AGGTGGATGCATTTTTTGTCTGTTT (SEQ ID NO: 169) |
| | | | | | TGTCAGAAATCAGATCAGCCCTCAA (SEQ ID NO: 170) |
| 202024_at | ASNA1 | ARSA-I, ARSA1, | arsA arsenite | 439 | CGTCATCCGCTCAGTCAGCGAACAG (SEQ ID NO: 171) |
| | | MGC3821 | transporter, ATP- | | GGACCCTGAGCAGACAACTTTCATC (SEQ ID NO: 172) |
| | | | binding, homolog 1 | | GCGTATGCATTGCTGAGTTCCTGTC (SEQ ID NO: 173) |
| | | | (bacterial) | | TATAATTGTCAACCAGCTCGTCTTC (SEQ ID NO: 174) |
| | | | | | CCCGAGAAGCCCTGCAAGATGTGTG (SEQ ID NO: 175) |
| | | | | | TGAGGCCCGTCACAAGATCCAGGCC (SEQ ID NO: 176) |
| | | | | | AGACTTCCACATCGTGAAGCTGCCG (SEQ ID NO: 177) |
| | | | | | CCGCTGTTACCCCATGAGGTGCGGG (SEQ ID NO: 178) |
| | | | | | CAGACAAGGTCAACACCTTCTCGGC (SEQ ID NO: 179) |
| | | | | | GGGCAGAGTTTGCACAAAGTCCCCC (SEQ ID NO: 180) |
| | | | | | TGGTGGGGAGCTGTAGTTGCCCCCT (SEQ ID NO: 181) |
| 218857_s_at | ASRGL1 | ALP, ALP1, | asparaginase like 1 | 80150 | GACTCACCCTGTTCCACATAGAACA (SEQ ID NO: 182) |
| | | FLJ22316 | | | AGAAGAGGCTGCGGACCTATCGTTG (SEQ ID NO: 183) |
| | | | | | GTGGCCTCATCGTGGTTAGCAAAAC (SEQ ID NO: 184) |
| | | | | | GGGTGGCAAAGTGGACCTCCACCTC (SEQ ID NO: 185) |
| | | | | | GGCAAGCTGCACTTCGGAATTGATC (SEQ ID NO: 186) |
| | | | | | TGACGATACTACTATCACCGACCTT (SEQ ID NO: 187) |
| | | | | | GACCTTCCCTAAGCCGCTGGAAGAT (SEQ ID NO: 188) |
| | | | | | GAGGTCAAGTACAGTCTCCTCATGA (SEQ ID NO: 189) |
| | | | | | GGAAAAATTGTCCCGTCTGTCACTT (SEQ ID NO: 190) |
| | | | | | TGTCACTTGTTTTGTTGCCTTAATA (SEQ ID NO: 191) |
| | | | | | GGGGCGGGTTCTGAAGCGATGAGAG (SEQ ID NO: 192) |
| 213036_x_at | ATP2A3 | SERCA3 | ATPase, Ca++ | 489 | CACGACACCCATGAGCCGAAAGGAT (SEQ ID NO: 193) |
| | | | transporting, | | TAAGGATGGCTGATTCCCCAAGGGC (SEQ ID NO: 194) |
| | | | ubiquitous | | CTCCCTCCCTGCTGGAGGAACACGT (SEQ ID NO: 195) |
| | | | | | TTTCTCTTAACTCAGCTTTTGCTAC (SEQ ID NO: 196) |
| | | | | | GAAACCTGCACCAAGGATTGTCCCT (SEQ ID NO: 197) |
| | | | | | CCCTCCTAGAGCGTGTGCAGACTGA (SEQ ID NO: 198) |
| | | | | | TAAATCAAGACTCACATCCCTTTCC (SEQ ID NO: 199) |
| | | | | | CAGCCTGCCTTGCAGACCAATGGGC (SEQ ID NO: 200) |
| | | | | | AATGGGCTCCATGTTCTGTAGCCCC (SEQ ID NO: 201) |
| | | | | | GTCTTAGCAGGAGCGGGCCCTGTAC (SEQ ID NO: 202) |
| | | | | | CCTGCTGACCTGCTGTTTGGTAGAG (SEQ ID NO: 203) |
| 201322_at | ATP5B | ATPMB, ATPSB, | ATP synthase, H+ | 506 | TTGGATGCTACCACTGTACTGTCGC (SEQ ID NO: 204) |
| | | MGC5231 | transporting, | | TCGCGTGCCATTGCTGAGCTGGGCA (SEQ ID NO: 205) |
| | | | mitochondrial F1 | | AGCTGTGGATCCTCTAGACTCCACC (SEQ ID NO: 206) |
| | | | complex, beta | | GTGAGCATTACGATGTTGCCCGTGG (SEQ ID NO: 207) |
| | | | polypeptide | | TCCTGCAGGACTACAAATCCCTCCA (SEQ ID NO: 208) |
| | | | | | GAAGACAAGTTGACCGTGTCCCGTG (SEQ ID NO: 209) |
| | | | | | TTGTCTCAGCCATTCCAGGTTGCTG (SEQ ID NO: 210) |
| | | | | | GAGGTCTTCACAGGTCATATGGGGA (SEQ ID NO: 211) |
| | | | | | GAAGCTGGTACCCCTGAAGGAGACC (SEQ ID NO: 212) |
| | | | | | ACAGGCCTTCTATATGGTGGGACCC (SEQ ID NO: 213) |
| | | | | | TCGTGAGGGGTCTTTGTCCTCTGTA (SEQ ID NO: 214) |
| 207507_s_at | ATP5G3 | MGC125738, P3 | ATP synthase, H+ | 518 | CGCGCAGTCCCGAAGAGTGTAAGAT (SEQ ID NO: 215) |
| | | | transporting, | | CCTCTCTGATCCGAGCTGGATCCAG (SEQ ID NO: 216) |
| | | | mitochondrial F0 | | GCATACAGACCAATTTCTGCATCAG (SEQ ID NO: 217) |
| | | | complex, subunit C3 | | TGCATCAGTGTTATCTCGACCAGAG (SEQ ID NO: 218) |
| | | | (subunit 9) | | ATCTCGACCAGAGGCTAGTAGGACT (SEQ ID NO: 219) |
| | | | | | TGGGGCCCAGAATGGTGTGTCTCAG (SEQ ID NO: 220) |
| | | | | | GTGTCTCAGCTAATCCAAAGGGAGT (SEQ ID NO: 221) |
| | | | | | TTGTTTGATGGTTGCTTTCTTGATT (SEQ ID NO: 222) |
| | | | | | ACTGCTTGACATGTTGGCATTCATA (SEQ ID NO: 223) |
| | | | | | TGTGTATCTTACTGTGACTCCGAAA (SEQ ID NO: 224) |
| | | | | | AAAACTGTAGTATTGGTGTCATGGG (SEQ ID NO: 225) |
| 200818_at | ATP5O | ATPO, OSCP | ATP synthase, H+ | 539 | GAAGGAACCCAAAGTGGCTGCTTCT (SEQ ID NO: 226) |
| | | | transporting, | | GAATCCCTATGTGAAGCGTTCCATT (SEQ ID NO: 227) |
| | | | mitochondrial F1 | | CCTCACTACCAACCTGATCAATTTG (SEQ ID NO: 228) |
| | | | complex, O subunit | | CAATACCCAAGGAGTCGTTTCTGCC (SEQ ID NO: 229) |
| | | | (oligomycin sensitivity | | CTACCATGATGAGTGTCCATCGCGG (SEQ ID NO: 230) |
| | | | conferring protein) | | GTGTCCATCGCGGAGAGGTACCTTG (SEQ ID NO: 231) |
| | | | | | GAGGTACCTTGCACAGTGACCTCTG (SEQ ID NO: 232) |
| | | | | | ATCTCCTTTAGAAGAAGCCACACTC (SEQ ID NO: 233) |
| | | | | | AGCCACACTCTCTGAATTAAAAACT (SEQ ID NO: 234) |
| | | | | | GGAGGCTAAGACTGATCCGTCAATC (SEQ ID NO: 235) |
| | | | | | GACTGATCCGTCAATCTTGGGTGGA (SEQ ID NO: 236) |
| 201089_at | ATP6V1B2 | ATP6B1B2, | ATPase, H+ | 526 | CTTTCCTGAGTGTTTGCTTTCGGTT (SEQ ID NO: 237) |
| | | ATP6B2, HO57, | transporting, | | GCTTTCGGTTTGTTGGTATGCCTGT (SEQ ID NO: 238) |
| | | VATB, VPP3, | lysosomal 56/58 kDa, | | TCTTTTTGCTCTTTCCTATATAATG (SEQ ID NO: 239) |
| | | Vma2 | V1 subunit B2 | | TGGGATTCCTGTGTCTTACAGCTCT (SEQ ID NO: 240) |
| | | | | | GCAACTTTTTGCACAGCTGGTATCT (SEQ ID NO: 241) |
| | | | | | TCTGGTAGCAGTGAGACCCCTTGTC (SEQ ID NO: 242) |
| | | | | | GGTGATCCTTACTGGGTTTCCAAGC (SEQ ID NO: 243) |
| | | | | | AAACCTACAGCCTTTCTACATTCTG (SEQ ID NO: 244) |
| | | | | | AGAGAGCAGCCTTTGAAAATCCCCA (SEQ ID NO: 245) |
| | | | | | GAAAATCCCCAATTTGGTTCTGCTT (SEQ ID NO: 246) |
| | | | | | CCTCTCTCTACCTTTTCAGGGTAAT (SEQ ID NO: 247) |
| 215608_at | AU144378* | | | | AAAGTGACTTGCCTGGAATGATACA (SEQ ID NO: 248) |
| | | | | | GCCTGGAATGATACAGCCACCGAGC (SEQ ID NO: 249) |
| | | | | | CCACCGAGCAGGAGGCAAGGAAAGC (SEQ ID NO: 250) |
| | | | | | GCAAGGAAAGCCAGCTCTGTCTAAC (SEQ ID NO: 251) |
| | | | | | AAGCCAGCTCTGTCTAACTGCTGCT (SEQ ID NO: 252) |
| | | | | | AGCTCTGTCTAACTGCTGCTGAGTA (SEQ ID NO: 253) |
| | | | | | GTCTAACTGCTGCTGAGTACTTTGT (SEQ ID NO: 254) |
| | | | | | ACTGCTGCTGAGTACTTTGTAAAAG (SEQ ID NO: 255) |
| | | | | | ACAAAAAATGTGATCCAGAACTGTG (SEQ ID NO: 256) |
| | | | | | TTCGAACCCAGCCTTTACAATGTAA (SEQ ID NO: 257) |
| | | | | | TTACAATGTAATGAAACCCTGCCTC (SEQ ID NO: 258) |
| 218580_x_at | AURKAIP1 | AIP, AKIP, | aurora kinase A | 54998 | GGAGCTGGAGGAGATGCTGGTCCCC (SEQ ID NO: 259) |
| | | FLJ20608 | interacting protein 1 | | CTGCCCAGACTGGATACCGGGACCG (SEQ ID NO: 260) |
| | | | | | TGTCCGCCCAGCCAGATAGGGGAAG (SEQ ID NO: 261) |
| | | | | | ATGAAGGCGTCGCGGATGCGCCTCA (SEQ ID NO: 262) |
| | | | | | AAAAACGTGCTGAAGATCCGCCGGC (SEQ ID NO: 263) |
| | | | | | TGAACCACCACAAGTACCGGAAGCT (SEQ ID NO: 264) |
| | | | | | GACGCGGTTCCTGCGGAGGAAGGTC (SEQ ID NO: 265) |
| | | | | | GGACGCCTGAGACGCAAGCAGATCA (SEQ ID NO: 266) |
| | | | | | ACCTGAGGCGCATCTGGCTGAAGGC (SEQ ID NO: 267) |
| | | | | | CCCCCAAGATCTACCTGCGGGGCAA (SEQ ID NO: 268) |
| | | | | | CGTTGCTGCTGTGATCCGTAGTAAT (SEQ ID NO: 269) |
| 219326_s_at | B3GNT2 | B3GN-T1, B3GN- | UDP-GlcNAc:betaGal | 10678 | GACGTTTATACTGGAATGTGCCTTC (SEQ ID NO: 270) |
| | | T2, B3GNT, | beta-1,3-N- | | AATGTGCCTTCAGAAACTCGGCCTC (SEQ ID NO: 271) |
| | | B3GNT-2, | acetylglucosaminyltransferase 2 | | CTCGGCCTCGTTCCAGAGAAACACA (SEQ ID NO: 272) |
| | | B3GNT1, | | | AACATCTGCTCCTATGTAGATCTGA (SEQ ID NO: 273) |
| | | BETA3GNT | | | TGGTCTCAGTTGCAGAGTGCTCATT (SEQ ID NO: 274) |
| | | | | | GAGTGATACCCATTTGAGGGCCTCT (SEQ ID NO: 275) |
| | | | | | TTGAGGGCCTCTAAACCCTTCAATT (SEQ ID NO: 276) |
| | | | | | GTTCTGATCTTACCGGCTAGTGGTC (SEQ ID NO: 277) |
| | | | | | TAAAAAACTTGTACCCTCTTATCTG (SEQ ID NO: 278) |
| | | | | | GTACCCTCTTATCTGAAATCCTGTT (SEQ ID NO: 279) |
| | | | | | CTTCTATAATATTCCTACTTCCCAT (SEQ ID NO: 280) |
| 91920_at | BCAN | RP11-66D17.1, | brevican | 63827 | AGCCAGCAGCCCAGGAGGAGTCACT (SEQ ID NO: 281) |
| | | BEHAB, CSPG7, | | | AGCCCAGGAGGAGTCACTCTCCCAG (SEQ ID NO: 282) |
| | | MGC13038 | | | CAGCAAGGGCAGTCCTGCAGCCTGG (SEQ ID NO: 283) |
| | | | | | AGTCCTGCAGCCTGGTGCATCACCA (SEQ ID NO: 284) |
| | | | | | AGCCTGGTGCATCACCACTTCCTGA (SEQ ID NO: 285) |
| | | | | | GGTGCATCACCACTTCCTGATGGAG (SEQ ID NO: 286) |
| | | | | | TTCCTGATGGAGAGTCAGAAGCTTC (SEQ ID NO: 287) |
| | | | | | GAGAGTCAGAAGCTTCCAGGCCTCC (SEQ ID NO: 288) |
| | | | | | CTTCCAGGCCTCCAAGGGTCCATGG (SEQ ID NO: 289) |
| | | | | | TCCAAGGGTCCATGGACCACCTACT (SEQ ID NO: 290) |
| | | | | | GTCCATGGACCACCTACTGAGACTC (SEQ ID NO: 291) |
| | | | | | GAGAGGAACCTAGCATCCCCATCAC (SEQ ID NO: 292) |
| | | | | | CATCACCTTCCACTCTGGTTGAGGC (SEQ ID NO: 293) |
| | | | | | CCACTCTGGTTGAGGCAAGAGAGGT (SEQ ID NO: 294) |
| | | | | | GAGGCAACTGGTGGTCCTGAGCTAT (SEQ ID NO: 295) |
| | | | | | AGCTATCTGGGGTCCCTCGAGGAGA (SEQ ID NO: 296) |
| 213156_at | BG251521* | | Homo sapiens, clone | | ACACACTTCCTATATGTATCCACAT (SEQ ID NO: 297) |
| | | | IMAGE: 4214654, | | ATCAGATGCTCATTACAAATCCAGA (SEQ ID NO: 298) |
| | | | mRNA | | TTGGACTCTTGCAACAGATCACAAA (SEQ ID NO: 299) |
| | | | | | GACTTTGGTCATTTCTGTATGTTCA (SEQ ID NO: 300) |
| | | | | | GGGCGAAACCATCTTGATCCGATGC (SEQ ID NO: 301) |
| | | | | | GATCCGATGCGAATGCAGTAATGTT (SEQ ID NO: 302) |
| | | | | | GTTCTATATACCATTTCATCAGTTA (SEQ ID NO: 303) |
| | | | | | GTTATTTCTTTTAGTCATGTTGATT (SEQ ID NO: 304) |
| | | | | | ACTACAGTGAAAGCCCTTTTCAGTG (SEQ ID NO: 305) |
| | | | | | TGGCCTGACTCAGAACTACCATGTG (SEQ ID NO: 306) |
| | | | | | GAAAATCAGTACTCTCTTAATGTTT (SEQ ID NO: 307) |
| 202592_at | BLOC1S1 | BLOS1, | biogenesis of | 2647 | TCCCGCCTCCTAAAAGAACACCAGG (SEQ ID NO: 308) |
| | | FLJ39337, | lysosome-related | | GGAGGCGAGAGGCTATCACTGCAGC (SEQ ID NO: 309) |
| | | FLJ97089, | organelles complex- | | CGACCTGCCTGACAGAAGCTTTGGT (SEQ ID NO: 310) |
| | | GCN5L1, | 1, subunit 1 | | GGTGTGGCCCAGGCCTACATGAACC (SEQ ID NO: 311) |
| | | MGC87455, | | | TGAAGACCCTACAGGTCCAGGCTGC (SEQ ID NO: 312) |
| | | MICoA, RT14 | | | CAGGCTGCCCAATTTGCCAAGCAGA (SEQ ID NO: 313) |
| | | | | | GCCAAGCAGACAGGCCAGTGGATCG (SEQ ID NO: 314) |
| | | | | | GGTGGAGAACTTCAACCAGGCACTC (SEQ ID NO: 315) |
| | | | | | TGTGGAGAACTGGGCTCGGAGCATC (SEQ ID NO: 316) |
| | | | | | CACCATTGCCACTGCACTGGAATAT (SEQ ID NO: 317) |
| | | | | | CTACCTCACCCGCAGGGGGAAGGAG (SEQ ID NO: 318) |
| 218220_at | C12orf10 | MST024, | chromosome 12 open | 60314 | CACGAGTTGCTCGACTTAATCCTAC (SEQ ID NO: 319) |
| | | MSTP024, MYG, | reading frame 10 | | TCAAGCGTGCAATGGATCTGGTTCA (SEQ ID NO: 320) |
| | | MYG1 | | | GATTAGATTTCTACCAACACAGCTG (SEQ ID NO: 321) |
| | | | | | CAGCGATTCCAGGTGGACCCAAGTG (SEQ ID NO: 322) |
| | | | | | ACTGGCGAAAGGTGCATGTCCCTGG (SEQ ID NO: 323) |
| | | | | | ATGTCCCTGGAAGGAGCATCTCTAC (SEQ ID NO: 324) |
| | | | | | CATCTCTACCACCTGGAATCTGGGC (SEQ ID NO: 325) |
| | | | | | CCATCTTCTTTGTTATCTACACTGA (SEQ ID NO: 326) |
| | | | | | GGACCAGGTCAGTGGGATCCCTGGC (SEQ ID NO: 327) |
| | | | | | GTCCATGCAAGCGGCTTCATTGGCG (SEQ ID NO: 328) |
| | | | | | CCGACCCGAGAGGGTGCCTTGAGCA (SEQ ID NO: 329) |
| 221777_at | C12orf52 | FLJ14827 | chromosome 12 open | 84934 | GTTAGCATTTCAGTGCCATCTACCC (SEQ ID NO: 330) |
| | | | reading frame 52 | | GCCATCTACCCCACGACGAGGTGGG (SEQ ID NO: 331) |
| | | | | | AGCCCCCTTGGAAATGATACTCTTT (SEQ ID NO: 332) |
| | | | | | GATACTCTTTCATCAGGGTTGCCTA (SEQ ID NO: 333) |
| | | | | | CTATGGGGCCACGGCGACAGGTATG (SEQ ID NO: 334) |
| | | | | | ATGGCCCCTTGCCAGGGTAGGAGGA (SEQ ID NO: 335) |
| | | | | | TCCCTTTATCCTGACAATCTCTAGT (SEQ ID NO: 336) |
| | | | | | AATCTCTAGTCGATTCTTGCCTTTT (SEQ ID NO: 337) |
| | | | | | CCTTTTTCTCCCGATTGCGGATTTG (SEQ ID NO: 338) |
| | | | | | ATTTGGGGGCCACCTCTAAGATGCC (SEQ ID NO: 339) |
| | | | | | AAATTAGTGCCAACCCAGGGGCCTG (SEQ ID NO: 340) |
| 214296_x_at | C19orf36 | IMAGE: 4215339 | chromosome 19 open | 113177 | ACGAGGGGTCGTGGATGTGGCCACA (SEQ ID NO: 341) |
| | | | reading frame 36 | | GTGGCCACACATAGGACCACACGTC (SEQ ID NO: 342) |
| | | | | | ACCACACGTCCCAGCTGGGAGGAGA (SEQ ID NO: 343) |
| | | | | | GTGGGGGACATGGAGAGCTGAGGCA (SEQ ID NO: 344) |
| | | | | | TCGGCGCAGTGGAAGTCAGCTGTCC (SEQ ID NO: 345) |
| | | | | | CTGGTATCGCCAGCCTTAAGGTGTC (SEQ ID NO: 346) |
| | | | | | ACTTGGCCAACCTGACCTTGGAAGA (SEQ ID NO: 347) |
| | | | | | GGAAGATGCTGCTGAGTGTCTCAAG (SEQ ID NO: 348) |
| | | | | | AGCAGCACTGACAGCAGCTGGGCCT (SEQ ID NO: 349) |
| | | | | | GGGCGGAGACTCAGCTGGACAGCCC (SEQ ID NO: 350) |
| | | | | | GAGGGAGGGAATGGGGGTGGGCTGT (SEQ ID NO: 351) |
| 219439_at | C1GALT1 | C1GALT, T- | core 1 synthase, | 56913 | TCTGACATAGAACACTGGAATCCCA (SEQ ID NO: 352) |
| | | synthase | glycoprotein-N- | | GGAATCCCAGTGAGGAATTCTAAGT (SEQ ID NO: 353) |
| | | | acetylgalactosamine | | GAACATTCCTTATAGAAACCTTTCA (SEQ ID NO: 354) |
| | | | 3-beta- | | AATGGTGGCCAGGTAGAGGAACTAG (SEQ ID NO: 355) |
| | | | galactosyltransferase, 1 | | GACCATCTGTGTTATTGTCACTGAG (SEQ ID NO: 355) |
| | | | | | ATTTACTAAAACTACACTGCACCAT (SEQ ID NO: 357) |
| | | | | | AACTACACTGCACCATGTTAGTAAT (SEQ ID NO: 358) |
| | | | | | GAAATATTGTTGCTCAGTGTTGTTA (SEQ ID NO: 359) |
| | | | | | TATGCTATAAATGATACCCCCCTAC (SEQ ID NO: 360) |
| | | | | | TAATTGGTAGTATTTCTTCCAGAAG (SEQ ID NO: 361) |
| | | | | | GACTGGCACTTACCCTGAAGTGCAT (SEQ ID NO: 362) |
| 212005_at | C1orf144 | DKFZp566C0424, | chromosome 1 open | 26099 | TTCCCATGAGCCACTACTCTGATGT (SEQ ID NO: 363) |
| | | MGC70432 | reading frame 144 | | TCCCATGAGCCACTACTCTGATGTC (SEQ ID NO: 364) |
| | | | | | CCATGAGCCACTACTCTGATGTCAG (SEQ ID NO: 365) |
| | | | | | GTCAGCCTATAACCAAAGGAGCTGG (SEQ ID NO: 366) |
| | | | | | GCCTATAACCAAAGGAGCTGGGGGG (SEQ ID NO: 367) |
| | | | | | TTTCTCAGCCCACTCAATCAGGGTG (SEQ ID NO: 368) |
| | | | | | CTCAGCCCACTCAATCAGGGTGCTC (SEQ ID NO: 369) |
| | | | | | AGCCTCCCTGGTAAGCAGAGACTCA (SEQ ID NO: 370) |
| | | | | | CCTCCCTGGTAAGCAGAGACTCAAG (SEQ ID NO: 371) |
| | | | | | GAGACTCAAGAAACCTCTGGGGTCC (SEQ ID NO: 372) |
| | | | | | GACTCAAGAAACCTCTGGGGTCCTG (SEQ ID NO: 373) |
| 210652_s_at | C1orf34 | C1orf34, DEME- | chromosome 1 open | 22996 | CACCTGTAAGTCTTTGTCTTCACCT (SEQ ID NO: 374) |
| | | 6, KIAA0452 | reading frame 34 | | TGTCTTCACCTATTATCATCTGGAG (SEQ ID NO: 375) |
| | | | | | GCTTGTGTGACGGAAGGTCCTTCAG (SEQ ID NO: 376) |
| | | | | | GAGGACCTGAGGAATGCCTGGGAGA (SEQ ID NO: 377) |
| | | | | | AAGCCTCAGGCTTCAATGCTTCTGG (SEQ ID NO: 378) |
| | | | | | GCTTCTGGGGTTGGGCATGAGGATG (SEQ ID NO: 379) |
| | | | | | TGGAAGAGCTGTGTAGCCCTTTCTA (SEQ ID NO: 380) |
| | | | | | GGCAGGAGGAGGTTCTCAGAATCCA (SEQ ID NO: 381) |
| | | | | | AGTCTGTATCTTTGCTGTATGCCAA (SEQ ID NO: 382) |
| | | | | | TAAAAATCTTCTGTACTTCACTCCA (SEQ ID NO: 383) |
| | | | | | ACTTCACTCCAAGGTACATTTGCTT (SEQ ID NO: 384) |
| 222301_at | C1orf61 | CROC4; | Chromosome 1 open | 10485 | CCTATTTAGATCCGTCAGCCCACGG (SEQ ID NO: 385) |
| | | FLJ38303; RP11- | reading frame 61 | | CAAGCAGTCATTCCCTGTTATACAA (SEQ ID NO: 386) |
| | | 139I14.3 | | | GTCATTCCCTGTTATACAAGCAAGA (SEQ ID NO: 387) |
| | | | | | AGACAGCAATGGGGCCTTTAGGCCT (SEQ ID NO: 388) |
| | | | | | CAGGCTGCGGCTGGCATATGGAGGT (SEQ ID NO: 389) |
| | | | | | ATTGGCTGCCATATTGTACCTCAGA (SEQ ID NO: 390) |
| | | | | | GTACCTCAGAGCACTAGCTCCTATC (SEQ ID NO: 391) |
| | | | | | CACTAGCTCCTATCTGGATTTTCCC (SEQ ID NO: 392) |
| | | | | | GCGGGGTTCCTAGAGGGTGGGAGAT (SEQ ID NO: 393) |
| | | | | | GAGATGGGTCTCCAGGGATTTATCC (SEQ ID NO: 394) |
| | | | | | CCTTTCCCCTGATATCTATCCAATA (SEQ ID NO: 395) |
| 219054_at | C5orf23 | CSGalNAcT-2, | chromosome 5 open | 79614 | GACAACAATGAAGTAGCCCCTGAAC (SEQ ID NO: 396) |
| | | DKFZp686H13226, | reading frame 23 | | GTAGCCCCTGAACAGCATGGAGTTG (SEQ ID NO: 397) |
| | | FLJ43310, | | | GAGTTGCTGTGAGTTTGTTCGTTGC (SEQ ID NO: 398) |
| | | GALNACT-2, | | | GTTCGTTGCAGACCTTTGTGTTGGG (SEQ ID NO: 399) |
| | | GALNACT2, | | | GGTCCTGGGAATCTGAGCTTTGTTC (SEQ ID NO: 400) |
| | | MGC40204, | | | CTTTGTTCCCTGTGCATGGTGGATA (SEQ ID NO: 401) |
| | | PRO0082 | | | GGGATAGACCTTGTGACAGACCAAT (SEQ ID NO: 402) |
| | | | | | GACAGACCAATTCTGTGACCCCTGT (SEQ ID NO: 403) |
| | | | | | TGACCCCTGTCTTCTGGGTCACATT (SEQ ID NO: 404) |
| | | | | | AAATGTGTATGTGTCCTTGTAAATG (SEQ ID NO: 405) |
| | | | | | GCAAGAATGCCACGTACTCAGAGTA (SEQ ID NO: 406) |
| 39817_s_at | C6orf108 | RCL, RP3- | chromosome 6 open | 10591 | AGTGACACAGCCATCCTTGGGTGTA (SEQ ID NO: 407) |
| | | 330M21.3, | reading frame 108 | | CACAGCCATCCTTGGGTGTAGGCTA (SEQ ID NO: 408) |
| | | dJ330M21.3 | | | AGTCTGGCCGCGTGCTTTCGGCCAT (SEQ ID NO: 409) |
| | | | | | GTCTGGCCGCGTGCTTTCGGCCATG (SEQ ID NO: 410) |
| | | | | | TGGCCGCGTGCTTTCGGCCATGATC (SEQ ID NO: 411) |
| | | | | | GGCCGCGTGCTTTCGGCCATGATCC (SEQ ID NO: 412) |
| | | | | | TGCTTTCGGCCATGATCCGGGGAGC (SEQ ID NO: 413) |
| | | | | | TTTCGGCCATGATCCGGGGAGCAGC (SEQ ID NO: 414) |
| | | | | | ATCCGGGGAGCAGCAGATGGCTCTC (SEQ ID NO: 415) |
| | | | | | GCAGCAGATGGCTCTCGGTTCCAGG (SEQ ID NO: 416) |
| | | | | | CAGCAGATGGCTCTCGGTTCCAGGT (SEQ ID NO: 417) |
| | | | | | AGCAGATGGCTCTCGGTTCCAGGTG (SEQ ID NO: 418) |
| | | | | | ATACTTCGAGGCTGATCCTCCAGGG (SEQ ID NO: 419) |
| | | | | | TTCGAGGCTGATCCTCCAGGGCAGG (SEQ ID NO: 420) |
| | | | | | TCGAGGCTGATCCTCCAGGGCAGGT (SEQ ID NO: 421) |
| | | | | | ATCCTCCAGGGCAGGTGGCTGCCTC (SEQ ID NO: 422) |
| 221100_at | C6orf15 | DADB-141O4.4, | chromosome 6 open | 29113 | CATCCACAGGGTTCTGCCTGATCAC (SEQ ID NO: 423) |
| | | STG | reading frame 15 | | TGATCACCCCTGGGGTACCCTGAAT (SEQ ID NO: 424) |
| | | | | | TACCCTGAATCCCAGTGTGTCCTGG (SEQ ID NO: 425) |
| | | | | | TGGTTGGGGAACGAGGCCCATGCCA (SEQ ID NO: 426) |
| | | | | | TCAATAATCAACCCCCAGGTACCAG (SEQ ID NO: 427) |
| | | | | | CAGGTATCAATAACCCATTTCCTCC (SEQ ID NO: 428) |
| | | | | | CTGGCTCTTCTTGGAACATCCCAGC (SEQ ID NO: 429) |
| | | | | | CTCCAAGCCCTAGGTTGCAGTGGGG (SEQ ID NO: 430) |
| | | | | | TTGGGAGTTAGAGTCCTGCTCCCGC (SEQ ID NO: 431) |
| | | | | | CTTGCTGTGTGGGCTCAATCCAGGC (SEQ ID NO: 432) |
| | | | | | TCCAGGCCCTGTTAACATGTTTCCA (SEQ ID NO: 433) |
| 219655_at | C7orf10 | DERP13, | chromosome 7 open | 79783 | GCAGAACCTCAGAACGCTGTCTCTG (SEQ ID NO: 434) |
| | | FLJ11808, | reading frame 10 | | GGGTATTACACAATGGCCTCGTTAT (SEQ ID NO: 435) |
| | | ORF19 | | | GATGGAGCATCCAACTGTGGGGAAG (SEQ ID NO: 436) |
| | | | | | CACACAACGCACATCCTGAAGGAGG (SEQ ID NO: 437) |
| | | | | | CGATGACAGGGCCATCGGGGAGCTG (SEQ ID NO: 438) |
| | | | | | TGCTCAGCGCTGGAGTGGTGGACCA (SEQ ID NO: 439) |
| | | | | | GGAAAAGGGCTCTTCCTCATAACCT (SEQ ID NO: 440) |
| | | | | | ACCTCGATCCGAATACACTGGCAAA (SEQ ID NO: 441) |
| | | | | | TCCCCAGTTCTGATACCACTAAGAA (SEQ ID NO: 442) |
| | | | | | AACTCCAGATTTCTTACATGGCATC (SEQ ID NO: 443) |
| | | | | | ACATGGCATCTCCAGAATGGCTCTG (SEQ ID NO: 444) |
| 219060_at | C8orf32 | FLJ10204 | chromosome 8 open | 55093 | AAGCTATCCTTTCATCGAGGACAGC (SEQ ID NO: 445) |
| | | | reading frame 32 | | ACATTATGGTACAGTTGGCTTGGAA (SEQ ID NO: 446) |
| | | | | | GGCTTGGAATTATGTCTTTCTCTTT (SEQ ID NO: 447) |
| | | | | | GTGCGTACTTGCTAAGATATTCCTG (SEQ ID NO: 448) |
| | | | | | GATATTCCTGTGGCTCATGCGTTAC (SEQ ID NO: 449) |
| | | | | | GCGTTACAACACGAGGACTTAAGCC (SEQ ID NO: 450) |
| | | | | | AAGCCAGTAATCGTTTTTGTTCAGA (SEQ ID NO: 451) |
| | | | | | AGAGGTGTGGAGGTAGAGCCAGCCC (SEQ ID NO: 452) |
| | | | | | TGTCTCTCCAGCTACATTGTAAGTT (SEQ ID NO: 453) |
| | | | | | AAATGCCCATAAAAGGTGCCCATAA (SEQ ID NO: 454) |
| | | | | | AGCCCTCTCAGACTTGAGCGTTAAT (SEQ ID NO: 455) |
| 220038_at | C8orf44 /// | FLJ11267 /// | serum/glucocorticoid | 56260 | TTTCCCTCTAAGTTTACACTAACAT (SEQ ID NO: 456) |
| | SGK3 | CISK, | regulated kinase | 23678 | GTTTACACTAACATCTACCCAAGAT (SEQ ID NO: 457) |
| | | DKFZp781N0293, | family, member 3 /// | | ACATCTACCCAAGATAGACTGTTTT (SEQ ID NO: 458) |
| | | SGK2, SGKL | chromosome 8 open | | ACAGTCAATTTCAGTTCAGCTAACA (SEQ ID NO: 459) |
| | | | reading frame 44 | | TTGTAACTCTTTGCTATGGCTTTTG (SEQ ID NO: 460) |
| | | | | | GCTATGGCTTTTGTTATCACACCAA (SEQ ID NO: 461) |
| | | | | | GTTATCACACCAAAACTATGCAATT (SEQ ID NO: 462) |
| | | | | | TATGCAATTGGTACATGGTTGTTTA (SEQ ID NO: 463) |
| | | | | | GAAACCGTATTTTTCCATGATAAAT (SEQ ID NO: 464) |
| | | | | | GAAATATTTGGTTCATGGTATGATC (SEQ ID NO: 465) |
| | | | | | CATAATTAACACATTGGCTGCTAGT (SEQ ID NO: 466) |
| 205308_at | C8orf70 | C8orf70, CGI-62 | chromosome 8 open | 51101 | GCAAAACTGTTGTAGGTGTTCCTTC (SEQ ID NO: 467) |
| | | | reading frame 70 | | AAGTGTCTTCAAGTAGCAGCTCTTT (SEQ ID NO: 468) |
| | | | | | AACAAACTTCAGACCTTGTCTCCCT (SEQ ID NO: 469) |
| | | | | | ATAAAGGGATAGCAGCCCCTCATGC (SEQ ID NO: 470) |
| | | | | | GCAGGAGCTAATGTCAAACCCCGAA (SEQ ID NO: 471) |
| | | | | | GAAATTCCACACCACCTAGTTTGGC (SEQ ID NO: 472) |
| | | | | | GCCCCAGGTGTGCTTACAAACAAAA (SEQ ID NO: 473) |
| | | | | | GAGAGCTACATAGCCAGGCCAGATG (SEQ ID NO: 474) |
| | | | | | AGATGGGGACTGTGCATCTTCCCTT (SEQ ID NO: 475) |
| | | | | | GGACATTCACCTGGAAACTTACCAA (SEQ ID NO: 476) |
| | | | | | GCTTGGACAGCTAGAGCACATCCTC (SEQ ID NO: 477) |
| 64408_s_at | CALML4 | MGC4809, NY- | calmodulin-like 4 | 91860 | GAAAGAAATTCTTCTAGCCATGTTG (SEQ ID NO: 478) |
| | | BR-20 | | | ATTCTTCTAGCCATGTTGATGGTGG (SEQ ID NO: 479) |
| | | | | | CTTCTAGCCATGTTGATGGTGGACA (SEQ ID NO: 480) |
| | | | | | CTAGCCATGTTGATGGTGGACAAGG (SEQ ID NO: 481) |
| | | | | | CGGTCAAAACTCACGAGTCTGGGGG (SEQ ID NO: 482) |
| | | | | | GGTCAAAACTCACGAGTCTGGGGGA (SEQ ID NO: 483) |
| | | | | | GATCACCCTTCCTGGACGGGACTAT (SEQ ID NO: 484) |
| | | | | | CACCCTTCCTGGACGGGACTATTGA (SEQ ID NO: 485) |
| | | | | | TTCCTGGACGGGACTATTGAAGGAG (SEQ ID NO: 486) |
| | | | | | CTCCCCTGGGCCTGAAAACTTGGAG (SEQ ID NO: 487) |
| | | | | | CCTGGGCCTGAAAACTTGGAGCAAT (SEQ ID NO: 488) |
| | | | | | CTGGGCCTGAAAACTTGGAGCAATT (SEQ ID NO: 489) |
| | | | | | AACACAGTGGCAAGACAACATTACC (SEQ ID NO: 490) |
| | | | | | AACATTACCCAACTATAGAAGAGAG (SEQ ID NO: 491) |
| | | | | | TACCCAACTATAGAAGAGAGGCTAA (SEQ ID NO: 492) |
| | | | | | ACCCAACTATAGAAGAGAGGCTAAC (SEQ ID NO: 493) |
| 212710_at | CAMSAP1 | RP11-100C15.2, | calmodulin regulated | 157922 | AACTCTGTTTATCAATGTCTCCTAT (SEQ ID NO: 494) |
| | | DKFZp434F195, | spectrin-associated | | TCCTATATTCAAAGCCCCTGCAGTG (SEQ ID NO: 495) |
| | | DKFZp434G2311, | protein 1 | | GCAGTGGTATTTGTGTCTCGTTGCA (SEQ ID NO: 496) |
| | | FLJ31228, | | | CAACTTTCGTTGTGTCTCAGAATTC (SEQ ID NO: 497) |
| | | MGC163452, | | | TAAGACAAGCTGCTCTACCCATTTA (SEQ ID NO: 498) |
| | | PRO2405, | | | ACTTGCGTGAGTCCCATTATTTTAC (SEQ ID NO: 499) |
| | | bA100C15.1 | | | TGTGCAGATACGTTCTACCCACACG (SEQ ID NO: 500) |
| | | | | | GCGTGCACATGGCTGTGTGCGTGCA (SEQ ID NO: 501) |
| | | | | | AGATGGACTGCTTTCCATGTGTCCT (SEQ ID NO: 502) |
| | | | | | CTCTTAGCAGACTTCAGGCCCAAAC (SEQ ID NO: 503) |
| | | | | | TCTAGGTTATACTTTTACCTCCCTG (SEQ ID NO: 504) |
| 212765_at | CAMSAP1L1 | RP11-93N17.1, | calmodulin regulated | 23271 | GAGTTCATTGCTCTCAGTATAAGAT (SEQ ID NO: 505) |
| | | KIAA1078, | spectrin-associated | | AAGTCTGAGGATTTTCGTCAACCTT (SEQ ID NO: 506) |
| | | MGC150680, | protein 1-like 1 | | CGTCAACCTTACTGAAACACACTGG (SEQ ID NO: 507) |
| | | MGC150681 | | | AACACACTGGTGCTTTCATCATCAG (SEQ ID NO: 508) |
| | | | | | TTGTCGTGGTTACCAGTGCAGCCTG (SEQ ID NO: 509) |
| | | | | | AAATTCTGCTATTTGACACAGCTTT (SEQ ID NO: 510) |
| | | | | | ATGGTTTCATGGACACTGTTGAGCA (SEQ ID NO: 511) |
| | | | | | AGTGTATGGTGTGCTTACCTGTCCA (SEQ ID NO: 512) |
| | | | | | TACCTGTCCACTCTAGAGCATTGCT (SEQ ID NO: 513) |
| | | | | | GAGCATTGCTTACAGGTTTTTTGTT (SEQ ID NO: 514) |
| | | | | | TGCTATTTCCTGGTACAGTGTAGTT (SEQ ID NO: 515) |
| 209970_x_at | CASP1 | ICE, IL1BC, P45 | caspase 1, | 834 | CGAAGGTGATCATCATCCAGGCCTG (SEQ ID NO: 516) |
| | | | apoptosis-related | | ACAGCCCTGGTGTGGTGTGGTTTAA (SEQ ID NO: 517) |
| | | | cysteine peptidase | | GGAAACCTATCTTTACCAACTACAG (SEQ ID NO: 518) |
| | | | (interleukin 1, beta, | | GAAGGATTTTATCGCTTTCTGCTCT (SEQ ID NO: 519) |
| | | | convertase) | | TTTCTGCTCTTCCACACCAGATAAT (SEQ ID NO: 520) |
| | | | | | GAGACATCCCACAATGGGCTCTGTT (SEQ ID NO: 521) |
| | | | | | GAATATGCCTGTTCCTGTGATGTGG (SEQ ID NO: 522) |
| | | | | | TTTCCGCAAGGTTCGATTTTCATTT (SEQ ID NO: 523) |
| | | | | | GATGGTAGAGCGCAGATGCCCACCA (SEQ ID NO: 524) |
| | | | | | TGACAAGATGTTTCTACCTCTTCCC (SEQ ID NO: 525) |
| | | | | | TTCTACCTCTTCCCAGGACATTAAA (SEQ ID NO: 526) |
| 211367_s_at | CASP1 | ICE, IL1BC, P45 | caspase 1, | 834 | GAGCTGAGGTTGACATCACAGGCAT (SEQ ID NO: 527) |
| | | | apoptosis-related | | ATCACAGGCATGACAATGCTGCTAC (SEQ ID NO: 528) |
| | | | cysteine peptidase | | GACAATGCTGCTACAAAATCTGGGG (SEQ ID NO: 529) |
| | | | (interleukin 1, beta, | | AAATCTGGGGTACAGCGTAGATGTG (SEQ ID NO: 530) |
| | | | convertase) | | AAAAAAATCTCACTGCTTCGGACAT (SEQ ID NO: 531) |
| | | | | | TCATGTCTCATGGTATTCGGGAAGG (SEQ ID NO: 532) |
| | | | | | GGTATTCGGGAAGGCATTTGTGGGA (SEQ ID NO: 533) |
| | | | | | GAAGAAACACTCTGAGCAAGTCCCA (SEQ ID NO: 534) |
| | | | | | ACTACAACTCAATGCAATCTTTAAC (SEQ ID NO: 535) |
| | | | | | GTTGAATACCAAGAACTGCCCAAGT (SEQ ID NO: 536) |
| | | | | | ACCGAAGGTGATCATCATCCAGGCC (SEQ ID NO: 537) |
| 211368_s_at | CASP1 | ICE, IL1BC, P45 | caspase 1, | 834 | AATGTTTCTTGGAGACATCCCACAA (SEQ ID NO: 538) |
| | | | apoptosis-related | | GGAGACATCCCACAATGGGCTCTGT (SEQ ID NO: 539) |
| | | | cysteine peptidase | | GGCTCTGTTTTTATTGGAAGACTCA (SEQ ID NO: 540) |
| | | | (interleukin 1, beta, | | GGAAGACTCATTGAACATATGCAAG (SEQ ID NO: 541) |
| | | | convertase) | | TATGCAAGAATATGCCTGTTCCTGT (SEQ ID NO: 542) |
| | | | | | GAGGAAATTTTCCGCAAGGTTCGAT (SEQ ID NO: 543) |
| | | | | | AAGGTTCGATTTTCATTTGAGCAGC (SEQ ID NO: 544) |
| | | | | | TGAGCAGCCAGATGGTAGAGCGCAG (SEQ ID NO: 545) |
| | | | | | GATGGTAGAGCGCAGATGCCCACCA (SEQ ID NO: 546) |
| | | | | | GACTTTGACAAGATGTTTCTACCTC (SEQ ID NO: 547) |
| | | | | | CTACCTCTTCCCAGGACATTAAAAT (SEQ ID NO: 548) |
| 220466_at | CCDC15 | FLJ13215 | coiled-coil domain | 80071 | GGGATTTTCTACCCAGAGACCTGCA (SEQ ID NO: 549) |
| | | | containing 15 | | ATGTTCTCTCCAACGACCAGAATAT (SEQ ID NO: 550) |
| | | | | | TGTCAGGACCAAGATTTTCTACCAA (SEQ ID NO: 551) |
| | | | | | AGAAGACTTTTCTCTGGCAGACTAT (SEQ ID NO: 552) |
| | | | | | AAATCAGCAACCTGCATCTTTTATG (SEQ ID NO: 553) |
| | | | | | GGAATTGCCTCTGGACTATCATCAA (SEQ ID NO: 554) |
| | | | | | GACCAAGACTCCCCTAGAGAACAGA (SEQ ID NO: 555) |
| | | | | | AAGCATATCAAACTACCCTCATCTT (SEQ ID NO: 556) |
| | | | | | GAGCACTGAATTCCAAGCTCCACTG (SEQ ID NO: 557) |
| | | | | | GCTCCACTGGCATTTCAGTCTGACG (SEQ ID NO: 558) |
| | | | | | GTACCTGAGACATAGACGACTTTTC (SEQ ID NO: 559) |
| 203418_at | CCNA2 | CCN1, CCNA | cyclin A2 | 890 | TACCCAATACTTTCTGCATCAGCAG (SEQ ID NO: 560) |
| | | | | | TCTGCATCAGCAGCCTGCAAACTGC (SEQ ID NO: 561) |
| | | | | | TGATAGATGCTGACCCATACCTCAA (SEQ ID NO: 562) |
| | | | | | CCATCAGTTATTGCTGGAGCTGCCT (SEQ ID NO: 563) |
| | | | | | TGGAGCTGCCTTTCATTTAGCACTC (SEQ ID NO: 564) |
| | | | | | TTTAGCACTCTACACAGTCACGGGA (SEQ ID NO: 565) |
| | | | | | GTCACGGGACAAAGCTGGCCTGAAT (SEQ ID NO: 566) |
| | | | | | GGAAAGTCTTAAGCCTTGTCTCATG (SEQ ID NO: 567) |
| | | | | | TACCTCAAAGCACCACAGCATGCAC (SEQ ID NO: 568) |
| | | | | | AAAGTATCATGGTGTTTCTCTCCTC (SEQ ID NO: 569) |
| | | | | | AAAGACTGCCTTTGTTTTCTAAGAT (SEQ ID NO: 570) |
| 201947_s_at | CCT2 | 99D8.1, CCT- | chaperonin | 10576 | GAAGCTGTTGCAATGGAGTCTTATG (SEQ ID NO: 571) |
| | | beta, CCTB, | containing TCP1, | | ATGTTGCCAACCATCATAGCTGACA (SEQ ID NO: 572) |
| | | MGC142074, | subunit 2 (beta) | | GCTATGACAGTGCAGACCTGGTGGC (SEQ ID NO: 573) |
| | | MGC142076, | | | GCTCAGGGCTGCTCACAGTGAAGGC (SEQ ID NO: 574) |
| | | PRO1633, TCP- | | | GAAGGCAATACCACTGCTGGATTGG (SEQ ID NO: 575) |
| | | 1-beta | | | AGATATGGCTATCCTGGGTATAACA (SEQ ID NO: 576) |
| | | | | | AGGTGATTCTGCGTGTGGACAACAT (SEQ ID NO: 577) |
| | | | | | GGACAACATCATCAAAGCGGCACCC (SEQ ID NO: 578) |
| | | | | | ACGTGCTGTCGATCTTTGGACCAGT (SEQ ID NO: 579) |
| | | | | | GACCAGTTTCTAGCAAAGTTGTGTT (SEQ ID NO: 580) |
| | | | | | ATTTAGCTGACCTTCGCTTTAACAT (SEQ ID NO: 581) |
| 214464_at | CDC42BPA | MRCK; MRCKA; | CDC42 binding | 8476 | ATTCGGAACTGTGAAGCACCTTATA (SEQ ID NO: 582) |
| | | PK428; | protein kinase alpha | | GTTAGTAGCCCAACAGATACATCGA (SEQ ID NO: 583) |
| | | FLJ23347; | (DMPK-like) | | GCCACCATCTGCCATTTGTTGGTTT (SEQ ID NO: 584) |
| | | KIAA0451; | | | GTAGCTGTGTACTTTCTGATCGGAG (SEQ ID NO: 585) |
| | | DKFZp686L1738; | | | GTACTTTCTGATCGGAGCTGTTTAA (SEQ ID NO: 586) |
| | | DKFZp686P1738 | | | TGTTTAAGAGTTACGGCTGGTCCCA (SEQ ID NO: 587) |
| | | | | | TCCCACCTCACTGGATCTTGATGTT (SEQ ID NO: 588) |
| | | | | | GAGGACTCTAGACAACAACTTAGCA (SEQ ID NO: 589) |
| | | | | | AACACAGACTGTCCAAGCTCTGCAG (SEQ ID NO: 590) |
| | | | | | AGCTCTGCAGTATTCAACTGTTGAT (SEQ ID NO: 591) |
| | | | | | GATGGTCCACTAACAGCAAGCAAAG (SEQ ID NO: 592) |
| 221520_s_at | CDCA8 | BOR, | cell division cycle | 55143 | TGGGACTTAGGGATCTTTCACCTGC (SEQ ID NO: 593) |
| | | BOREALIN, | associated 8 | | CCTGCTGTGCCCAGTAGTTCTGAAG (SEQ ID NO: 594) |
| | | FLJ10468, | | | GTTTATCCCTGTTTACTGAAGACCA (SEQ ID NO: 595) |
| | | FLJ12042 | | | GAGACAACTTCCATGTCTTGCTCTT (SEQ ID NO: 596) |
| | | | | | TCTTCTACCTCCCTAGTTAGTGGAA (SEQ ID NO: 597) |
| | | | | | AGGGAACTGTAGGGCCCAGATTCTG (SEQ ID NO: 598) |
| | | | | | AACTGTCTCTAAGCTATCCATGGTC (SEQ ID NO: 599) |
| | | | | | AGCAGTGAGGTCCTCATTCTCCAGC (SEQ ID NO: 600) |
| | | | | | CTGCCCTGGAGAATCATGTGCTATG (SEQ ID NO: 601) |
| | | | | | TTGAGAACTAGAGTCCTCATCCCCA (SEQ ID NO: 602) |
| | | | | | TTCTCATGTAGGGCTCTCTGTGGTA (SEQ ID NO: 603) |
| 213230_at | CDR2L | HUMPPA | cerebellar | 30850 | GCTGCGTCAGGAGTTTTGCTTCAAG (SEQ ID NO: 604) |
| | | | degeneration-related | | AGTTCAGCTAAGAGACACCCAGGTC (SEQ ID NO: 605) |
| | | | protein 2-like | | GCCCTTCCTGAGACCTTAGAAACCA (SEQ ID NO: 606) |
| | | | | | GAAACCAGAAGAGCCATACAGTCAG (SEQ ID NO: 607) |
| | | | | | TACAGTCAGTGGAAGGCGGGGGGGC (SEQ ID NO: 608) |
| | | | | | GGATCCCAGTGGGAACCTTCATGCC (SEQ ID NO: 609) |
| | | | | | ATGGGAGCTGGTGGCGACTGAGTCC (SEQ ID NO: 610) |
| | | | | | AGTCCTTCTGTACGTGCAACTGGGA (SEQ ID NO: 611) |
| | | | | | TTGTCCTTTGAGGCTAGGCAGCTCC (SEQ ID NO: 612) |
| | | | | | TCCGTGTGTGTCTGTTATCTGGGGG (SEQ ID NO: 613) |
| | | | | | CAGACCAGCGTCACCTTTGAAGTAT (SEQ ID NO: 614) |
| 207719_x_at | CEP170 | FAM68A, KAB, | centrosomal protein | 9859 | GTAACTCTATACACTTCAAGACTTT (SEQ ID NO: 615) |
| | | KIAA0470 | 170 kDa | | TAATGGATCTCCTATTTTTCTTTAA (SEQ ID NO: 616) |
| | | | | | AATGAACTATTCTCCTTGTAAAGCT (SEQ ID NO: 617) |
| | | | | | TAAAGCTAAATTCCCCATTCTGTCT (SEQ ID NO: 618) |
| | | | | | AATAATCAGCATTGCTCCCTCTTTT (SEQ ID NO: 619) |
| | | | | | ATTGCTCCCTCTTTTATTTAATATT (SEQ ID NO: 620) |
| | | | | | GGGTACTGATTATATCCACATGGAA (SEQ ID NO: 621) |
| | | | | | AATCTACTCTGCTTACATTCTTGTT (SEQ ID NO: 622) |
| | | | | | GTGTTTACACAGTTTGGTTCAATTA (SEQ ID NO: 623) |
| | | | | | CATTTGGCCTTTTACTATGTTATTT (SEQ ID NO: 624) |
| | | | | | ACATTATCCTCCTTATTTATTTTTG (SEQ ID NO: 625) |
| 207209_at | CETN1 | CEN1, CETN | centrin, EF-hand | 1068 | CTAAAGTGACTCTCTGGGTTGCCTG (SEQ ID NO: 626) |
| | | | protein, 1 | | TAGAGGACAGCGGCTGCCTGTCCCT (SEQ ID NO: 627) |
| | | | | | CTCACCCCCATAATTTGTCTAGATC (SEQ ID NO: 628) |
| | | | | | GGCCCTGAAGTTTGAGTGCGCCCTC (SEQ ID NO: 629) |
| | | | | | GGACAGCTTCTGGGACACACAAAAA (SEQ ID NO: 630) |
| | | | | | TCCCTTTGTCACTTCTTTGGTGGTC (SEQ ID NO: 631) |
| | | | | | TCTTGCTTCATATATCATTCCTTAA (SEQ ID NO: 632) |
| | | | | | AAATTCCAGTCATTGTTCCAGCATA (SEQ ID NO: 633) |
| | | | | | GCCAGTAGATTTGCCTAGCCTGTCC (SEQ ID NO: 634) |
| | | | | | TAGCCTGTCCACTTAGCTGAATACC (SEQ ID NO: 635) |
| | | | | | GTGGCCACTTACAAACTTACGGAGC (SEQ ID NO: 636) |
| 202357_s_at | CFB | DADB-122G4.5, | complement factor B | 629 | CAGACTATCAGGCCCATTTGTCTCC (SEQ ID NO: 637) |
| | | BF, BFD, CFAB, | | | TCCCCTGCACCGAGGGAACAACTCG (SEQ ID NO: 638) |
| | | FB, FBI12, GBG, | | | GAACAACTCGAGCTTTGAGGCTTCC (SEQ ID NO: 639) |
| | | H2-Bf, PBF2 | | | CAACTACCACTTGCCAGCAACAAAA (SEQ ID NO: 640) |
| | | | | | CCCTGCACAGGATATCAAAGCTCTG (SEQ ID NO: 641) |
| | | | | | GCTCTGTTTGTGTCTGAGGAGGAGA (SEQ ID NO: 642) |
| | | | | | ACTCGGAAGGAGGTCTACATCAAGA (SEQ ID NO: 643) |
| | | | | | GAAGTCGTTTCATTCAAGTTGGTGT (SEQ ID NO: 644) |
| | | | | | AAGTTGGTGTAATCAGCTGGGGAGT (SEQ ID NO: 645) |
| | | | | | GCTGGGGAGTAGTGGATGTCTGCAA (SEQ ID NO: 646) |
| | | | | | ACTTTCACATCAACCTCTTTCAAGT (SEQ ID NO: 647) |
| 218927_s_at | CHST12 | C4S-2, C4ST-2, | carbohydrate | 55501 | GACCCGCACACGGAGAAGCTGGCGC (SEQ ID NO: 648) |
| | | C4ST2 | (chondroitin 4) | | CACTGGCGGCAGGTGTACCGCCTCT (SEQ ID NO: 649) |
| | | | sulfotransferase 12 | | GCCAGATCGACTACGACTTCGTGGG (SEQ ID NO: 650) |
| | | | | | GCTGGAGACTCTGGACGAGGACGCC (SEQ ID NO: 651) |
| | | | | | GGAGGAGGACTGGTTCGCCAAGATC (SEQ ID NO: 652) |
| | | | | | TAAACTCTACGAGGCCGACTTTGTT (SEQ ID NO: 653) |
| | | | | | GAAAACCTCCTCCGAGACTGAAAGC (SEQ ID NO: 654) |
| | | | | | AAAGCTTTCGCGTTGCTTTTTCTCG (SEQ ID NO: 655) |
| | | | | | GCGTGCCTGGAACCTGACGCACGCG (SEQ ID NO: 656) |
| | | | | | TTTGCAATCTGGGCTTCTTGTTCAC (SEQ ID NO: 657) |
| | | | | | TCCACTGCCTCTATCCATTGAGTAC (SEQ ID NO: 658) |
| 209666_s_at | CHUK | IKBKA, IKK- | conserved helix-loop- | 1147 | CAATCTTTCATGTCTTGTCATACAA (SEQ ID NO: 659) |
| | | alpha, IKK1, | helix ubiquitous | | ACAAATTTATAAAGGTCTGCACTCC (SEQ ID NO: 660) |
| | | IKKA, NFKBIKA, | kinase | | TCTGCACTCCTTTATCTGTAATTGT (SEQ ID NO: 661) |
| | | TCF16 | | | AAGGTTTCCATAAGCTTGGTGACAA (SEQ ID NO: 662) |
| | | | | | ATTTGCTTGCAATCTAATCTGAACT (SEQ ID NO: 663) |
| | | | | | AATCTGAACTGACCTTGAATCTTTT (SEQ ID NO: 664) |
| | | | | | TATCCCATTTAGTGTGAATATTCCT (SEQ ID NO: 665) |
| | | | | | TGTGAATATTCCTTTATTTTGCTGC (SEQ ID NO: 666) |
| | | | | | CCACAGACTGTGGTGAGGGCTGGTT (SEQ ID NO: 667) |
| | | | | | GAGGGCTGGTTAATGTAGTATGGTA (SEQ ID NO: 668) |
| | | | | | ATATGCACAAAACTACTTTTCTAAA (SEQ ID NO: 669) |
| 214252_s_at | CLN5 | FLJ90628, NCL | ceroid-lipofuscinosis, | 1203 | TATGCATGATGCCATTGGATTCAGA (SEQ ID NO: 670) |
| | | | neuronal 5 | | GGATTCAGAAGTACATTAACTGGCA (SEQ ID NO: 671) |
| | | | | | TAACTGGCAAGAACTACACAATGGA (SEQ ID NO: 672) |
| | | | | | TGGTATGAACTTTTCCAACTTGGCA (SEQ ID NO: 673) |
| | | | | | ACTTGGCAACTGTACATTTCCCCAT (SEQ ID NO: 674) |
| | | | | | ATCTCCGACCTGAAATGGATGCCCC (SEQ ID NO: 675) |
| | | | | | ACCTGAAATGGATGCCCCTTTCTGG (SEQ ID NO: 676) |
| | | | | | ATGCCCCTTTCTGGTGTAATCAAGG (SEQ ID NO: 677) |
| | | | | | TTCTGGTGTAATCAAGGCGCTGCCT (SEQ ID NO: 678) |
| | | | | | TGCTTTTTTGAGGGAATTGATGATG (SEQ ID NO: 679) |
| | | | | | AATGGGACATTAGTTCAAGTAGCAA (SEQ ID NO: 680) |
| 204050_s_at | CLTA | CLTA2, | clathrin, light chain | 1211 | GGAACGCTTGGAAGCCCTTGATGCC (SEQ ID NO: 681) |
| | | MGC140767 | (Lca) | | ACGCTTGGAAGCCCTTGATGCCAAT (SEQ ID NO: 682) |
| | | | | | TTGGAAGCCCTTGATGCCAATTCTC (SEQ ID NO: 683) |
| | | | | | CCCTTGATGCCAATTCTCGGAAGCA (SEQ ID NO: 684) |
| | | | | | GCCAATTCTCGGAAGCAAGAAGCAG (SEQ ID NO: 685) |
| | | | | | GAATGGTATGCAAGACAGGACGAGC (SEQ ID NO: 686) |
| | | | | | GCAAGACAGGACGAGCAGCTACAGA (SEQ ID NO: 687) |
| | | | | | GACAGGACGAGCAGCTACAGAAAAC (SEQ ID NO: 688) |
| | | | | | GGAAGCTTCCCAAGAGTAGCCTCAA (SEQ ID NO: 689) |
| | | | | | CTTCCCAAGAGTAGCCTCAACCTGT (SEQ ID NO: 690) |
| | | | | | CAAGAGTAGCCTCAACCTGTGCTTC (SEQ ID NO: 691) |
| 217870_s_at | CMPK1 | CMK; UMK; | cytidine | 51727 | GGAATGAGTTCTTATCTAGTGTTGC (SEQ ID NO: 692) |
| | | CMPK; UMPK; | monophosphate | | TCTTATCTAGTGTTGCAGGCCAGCA (SEQ ID NO: 693) |
| | | UMP-CMPK1; | (UMP-CMP) kinase | | GGTTTCGAGAGCATTCCTACTCACA (SEQ ID NO: 694) |
| | | RP11-511I2.1 | 1, cytosolic | | GAGCATTCCTACTCACATAAGTGAA (SEQ ID NO: 695) |
| | | | | | TGAGACTAGGTGCTTTGCTTCCTTT (SEQ ID NO: 696) |
| | | | | | GCTTCCTTTCATCAGGTATCTTTCT (SEQ ID NO: 697) |
| | | | | | AGGTATCTTTCTGTGGCATTTGAGA (SEQ ID NO: 698) |
| | | | | | TTACTAAATTATGAGGCTTTGCTTT (SEQ ID NO: 699) |
| | | | | | TAACTAGTTTTGTCATTCCATTTGT (SEQ ID NO: 700) |
| | | | | | GATACAGTCACCAAGAATGTTTTGA (SEQ ID NO: 701) |
| | | | | | AGACCCCAATTTAAGCCTTGCTTAT (SEQ ID NO: 702) |
| 218250_s_at | CNOT7 | CAF1, hCAF-1 | CCR4-NOT | 29883 | GGTTACGACTTTGGCTACTTAATCA (SEQ ID NO: 703) |
| | | | transcription | | TCCTAACCAACTCTAACTTGCCTGA (SEQ ID NO: 704) |
| | | | complex, subunit 7 | | AGGACCACAACATCAGGCAGGATCT (SEQ ID NO: 705) |
| | | | | | GGCAGGATCTGATTCATTGCTCACA (SEQ ID NO: 706) |
| | | | | | TGCTCACAGGAATGGCCTTTTTCAA (SEQ ID NO: 707) |
| | | | | | GTGGTCATTTGTATGGCCTTGGTTC (SEQ ID NO: 708) |
| | | | | | CCTTGGTTCTGGTTCATCCTATGTA (SEQ ID NO: 709) |
| | | | | | ATTTCGAGCTACACACATGCTTGTA (SEQ ID NO: 710) |
| | | | | | GTTTTATCTCTGGTTGAATCCCTCG (SEQ ID NO: 711) |
| | | | | | GAATCCCTCGAACAATAGACAGTAC (SEQ ID NO: 712) |
| | | | | | CATGGCCCATTTTATTGTCTGCCTT (SEQ ID NO: 713) |
| 209796_s_at | CNPY2 | MGC156825, | canopy 2 homolog | 10330 | TGGAGCGACCCCATTACGCTAAAGA (SEQ ID NO: 714) |
| | | Tmem4 | (zebrafish) | | GAGCGACCCCATTACGCTAAAGATG (SEQ ID NO: 715) |
| | | | | | GACCCCATTACGCTAAAGATGAAAG (SEQ ID NO: 716) |
| | | | | | GAGCCAGGATCTCCACTGTGGAGCA (SEQ ID NO: 717) |
| | | | | | GAATGGGAAATTGCCCAGGTGGACC (SEQ ID NO: 718) |
| | | | | | ACCCCAAGAAGACCATTCAGATGGG (SEQ ID NO: 719) |
| | | | | | GACCATTCAGATGGGATCTTTCCGG (SEQ ID NO: 720) |
| | | | | | GATGGGATCTTTCCGGATCAATCCA (SEQ ID NO: 721) |
| | | | | | GGATCTTTCCGGATCAATCCAGATG (SEQ ID NO: 722) |
| | | | | | TTTCCGGATCAATCCAGATGGCAGC (SEQ ID NO: 723) |
| | | | | | TCCAGATGGCAGCCAGTCAGTGGTG (SEQ ID NO: 724) |
| 213050_at | COBL | DKFZp686G13227, | cordon-bleu homolog | 23242 | GCCATTCCCCAGGCTATGAAGTGAC (SEQ ID NO: 725) |
| | | KIAA0633, | (mouse) | | GCCTGTGTACGGAGCCTGATGACTT (SEQ ID NO: 726) |
| | | MGC131893 | | | TCACTGGGAGCCTTCTGGAATCCTG (SEQ ID NO: 727) |
| | | | | | CAGGGATGTTGGATGCCCACCTGTC (SEQ ID NO: 728) |
| | | | | | AATTTTGGTTCAGCCTTGACGCGTT (SEQ ID NO: 729) |
| | | | | | TTGACGCGTTTGTCCAACAGCTCAT (SEQ ID NO: 730) |
| | | | | | TTGGCTCCCTTTGTATGATATCGTG (SEQ ID NO: 731) |
| | | | | | AATGTTTCACAGCGATCTCAGATCT (SEQ ID NO: 732) |
| | | | | | TGGAAGCTGTTCTGCATTCACTGAT (SEQ ID NO: 733) |
| | | | | | GAGCTACCAGCCAATTGCTCTTCAT (SEQ ID NO: 734) |
| | | | | | AGCTATCTGTCTTTTAGTGCCACAA (SEQ ID NO: 735) |
| 206441_s_at | COMMD4 | FLJ20452 | COMM domain | 54939 | GGAGCTGCTGGGACAGGGGATTGAT (SEQ ID NO: 736) |
| | | | containing 4 | | AGCTCACGGCTGACGCCAAGTTTGA (SEQ ID NO: 737) |
| | | | | | TCCAGTGCGGCCAAGCACAGTGTCG (SEQ ID NO: 738) |
| | | | | | AGTGTCGATGGCGAATCCTTGTCCA (SEQ ID NO: 739) |
| | | | | | TCCTTGTCCAGTGAACTGCAGCAGC (SEQ ID NO: 740) |
| | | | | | AGCTGGGGCTGCCCAAAGAGCACGC (SEQ ID NO: 741) |
| | | | | | CCAGCCTGTGCCGCTGTTATGAGGA (SEQ ID NO: 742) |
| | | | | | CAAAGCCCCTTGCAGAAGCACTTGC (SEQ ID NO: 743) |
| | | | | | TGAACTGCTCTTCGGGAGGCAGCCC (SEQ ID NO: 744) |
| | | | | | GCCCTGGTTCTAGGATGCTGAGGCC (SEQ ID NO: 745) |
| | | | | | GCCTCACTTCTCTCTTGAGAACTTG (SEQ ID NO: 746) |
| 202078_at | COPS3 | SGN3 | COP9 constitutive | 8533 | GACCTTTTTAACTCTATCATTACAA (SEQ ID NO: 747) |
| | | | photomorphogenic | | ATGGCAAGTCGTGTGCAGTTGTCTG (SEQ ID NO: 748) |
| | | | homolog subunit 3 | | TGTGCAGTTGTCTGGACCTCAGGAG (SEQ ID NO: 749) |
| | | | (Arabidopsis) | | TGGTCAGTTTCCATGATAACCCTGA (SEQ ID NO: 750) |
| | | | | | ATAACCCAGCCATGCTTCATAACAT (SEQ ID NO: 751) |
| | | | | | GGAGATCACAGTGAACCCTCAGTTT (SEQ ID NO: 752) |
| | | | | | GAAACAAACCATCCAGTTATTCTTG (SEQ ID NO: 753) |
| | | | | | AAGAGAAACTACCATCTTGGCCAGT (SEQ ID NO: 754) |
| | | | | | GTGACAAGTGTTCGGAGGGCAGCAG (SEQ ID NO: 755) |
| | | | | | CAGAGAGGACCAAGCCTGTGTCACC (SEQ ID NO: 756) |
| | | | | | TTGACATCTTCAGTCCTGTGTGCTT (SEQ ID NO: 757) |
| 218328_at | COQ4 | OSTLU_119511 | coenzyme Q4 | 51117 | AAGTGCTGGTCTCGGAGTTGATCCC (SEQ ID NO: 758) |
| | | | homolog (S. cerevisiae) | | GTTGATCCCATGGGCCGTTCAGAAC (SEQ ID NO: 759) |
| | | | | | AACGGGCGCAGAGCCCATTGTGTCC (SEQ ID NO: 760) |
| | | | | | CAACCTGTACTATGAGCGGCGCTGG (SEQ ID NO: 761) |
| | | | | | AGGAGCTGGGCATTACAGCACCACC (SEQ ID NO: 762) |
| | | | | | TCTTCTTTGAACACTGACCCTTGGA (SEQ ID NO: 763) |
| | | | | | CTGAGTGGCCTTGAGGACGAACCCC (SEQ ID NO: 764) |
| | | | | | GCAAGCAGTACAGTGGCATTCCCAG (SEQ ID NO: 765) |
| | | | | | GAACAGTATCAGTCGTCTGGGCTCA (SEQ ID NO: 766) |
| | | | | | ATTGTGCAGTGCTCCTGTTGCAACT (SEQ ID NO: 767) |
| | | | | | GGAGTGAGGGCTACACCCAATTCCA (SEQ ID NO: 768) |
| 203663_s_at | COX5A | COX, COX-VA, | cytochrome c oxidase | 9377 | GTTTGATGCTCGCTGGGTAACATAC (SEQ ID NO: 769) |
| | | VA | subunit Va | | TGCTCGCTGGGTAACATACTTCAAC (SEQ ID NO: 770) |
| | | | | | AACACACTTGTTACCTATGATATGG (SEQ ID NO: 771) |
| | | | | | CCTATGATATGGTTCCAGAGCCCAA (SEQ ID NO: 772) |
| | | | | | CGGAGGAACTGGGCCTTGACAAAGT (SEQ ID NO: 773) |
| | | | | | GGGCCTTGACAAAGTGTAAACCGCA (SEQ ID NO: 774) |
| | | | | | GTAAACCGCATGGATGGGCTTCCCC (SEQ ID NO: 775) |
| | | | | | GGCTTCCCCAAGGATTTATTGACAT (SEQ ID NO: 776) |
| | | | | | TTGCTACTTGAGTGTGAACAGTTAC (SEQ ID NO: 777) |
| | | | | | GAACAGTTACCTGGAAATACTGATG (SEQ ID NO: 778) |
| | | | | | CCTTTATTGAGTACCAAGCCATGTA (SEQ ID NO: 779) |
| 218871_x_at | CSGALNACT2 | CSGalNAcT-2, | chondroitin sulfate N- | 55454 | AAAATCATTACTCTTTTTCTCAGTA (SEQ ID NO: 780) |
| | | DKFZp686H13226, | acetylgalactosaminyltransferase 2 | | AATATTACAATAACTCTTACCTAAT (SEQ ID NO: 781) |
| | | FLJ43310, | | | TAACTCTTACCTAATTATTCTTACA (SEQ ID NO: 782) |
| | | GALNACT-2, | | | AGATGTGTGAAATGTTCTCTGCAAA (SEQ ID NO: 783) |
| | | GALNACT2, | | | AATAATTCAGGCCACTGTCTCCTTT (SEQ ID NO: 784) |
| | | MGC40204, | | | GCCACTGTCTCCTTTTATATATTAT (SEQ ID NO: 785) |
| | | PRO0082 | | | GAAGACCAGTGAATTACGATATTTA (SEQ ID NO: 786) |
| | | | | | GGTAAGTTACAGCTTGTTTTTTGAG (SEQ ID NO: 787) |
| | | | | | ATGAGTTTACTTTTGTTCCTGTTGT (SEQ ID NO: 788) |
| | | | | | TGTTCCTGTTGTTTTTAACTAGCTT (SEQ ID NO: 789) |
| | | | | | ATGGAAATGCTATACGTTTTTGACA (SEQ ID NO: 790) |
| 222235_s_at | CSGALNACT2 | CSGalNAcT-2, | chondroitin sulfate N- | 55454 | ATATTCAGATAGGACTGCACTACAT (SEQ ID NO: 791) |
| | | DKFZp686H13226, | acetylgalactosaminyltransferase 2 | | CAGATAGGACTGCACTACATTATTT (SEQ ID NO: 792) |
| | | FLJ43310, | | | ATCTGTTACCATCAGGTCAATTCCT (SEQ ID NO: 793) |
| | | GALNACT-2, | | | GTTACCATCAGGTCAATTCCTAGTA (SEQ ID NO: 794) |
| | | GALNACT2, | | | AGGTCAATTCCTAGTATGCATAAAT (SEQ ID NO: 795) |
| | | MGC40204, | | | GAGACCTATGTTGAAAACCCCTGAA (SEQ ID NO: 796) |
| | | PRO0082 | | | TTTTTCTCAGTAAATCATATCATCT (SEQ ID NO: 797) |
| | | | | | ATTTCTAGGTGCTATATTAATTCAA (SEQ ID NO: 798) |
| | | | | | TGTGAAATGTTCTCTGCAAAATAAT (SEQ ID NO: 799) |
| | | | | | GCAAAATAATTCAGGCCACTGTCTC (SEQ ID NO: 800) |
| | | | | | TTTGCAAAGGTAAGTTACAGCTTGT (SEQ ID NO: 801) |
| 202156_s_at | CUGBP2 | BRUNOL3, ETR- | CUG triplet repeat, | 10659 | ATTTCTAAGACCATTTCATTCTGAA (SEQ ID NO: 802) |
| | | 3, NAPOR | RNA binding protein 2 | | TCTGAAACTTCTTATCAATTACCTA (SEQ ID NO: 803) |
| | | | | | TTTCTTCTTCACAAGTCACCAAGAG (SEQ ID NO: 804) |
| | | | | | TTCTCCAAAAAATAACCTTCCACAG (SEQ ID NO: 805) |
| | | | | | AGAGACAAACTGTCCTTCTATCCAC (SEQ ID NO: 806) |
| | | | | | CTTCTATCCACTTTTATCTTTTAAT (SEQ ID NO: 807) |
| | | | | | GCAAGGGTGCAAAGGGCCTGTGCCA (SEQ ID NO: 808) |
| | | | | | GATACAATGGCAGTCCTCAAAGGCG (SEQ ID NO: 809) |
| | | | | | AAGGCGTAACGAGTTCATCTTTCTT (SEQ ID NO: 810) |
| | | | | | TCATCTTTCTTTCACCATAGGGGTT (SEQ ID NO: 811) |
| | | | | | ATAGTTGGCTTGTGCTACTCTGGAA (SEQ ID NO: 812) |
| 204533_at | CXCL10 | C7, IFI10, INP10, | chemokine (C—X—C | 3627 | TAACTCTACCCTGGCACTATAATGT (SEQ ID NO: 813) |
| | | IP-10, SCYB10, | motif) ligand 10 | | GCTCTACTGAGGTGCTATGTTCTTA (SEQ ID NO: 814) |
| | | crg-2, gIP-10, | | | TCTTAGTGGATGTTCTGACCCTGCT (SEQ ID NO: 815) |
| | | mob-1 | | | TCTGACCCTGCTTCAAATATTTCCC (SEQ ID NO: 816) |
| | | | | | GGTACTAAGGAATCTTTCTGCTTTG (SEQ ID NO: 817) |
| | | | | | GCTTTGGGGTTTATCAGAATTCTCA (SEQ ID NO: 818) |
| | | | | | AATGCTCTTTACTTCATGGACTTCC (SEQ ID NO: 819) |
| | | | | | TTACTTCATGGACTTCCACTGCCAT (SEQ ID NO: 820) |
| | | | | | ATTCTTTCAGTGGCTACCTACATAC (SEQ ID NO: 821) |
| | | | | | GCTACCTACATACAATTCCAAACAC (SEQ ID NO: 822) |
| | | | | | AATGAGGTACTCTCCTGGAAATATT (SEQ ID NO: 823) |
| 210163_at | CXCL11 | H174, I-TAC, IP- | chemokine (C—X—C | 6373 | TTCTTTCCCCAAATATCATGTAGCA (SEQ ID NO: 824) |
| | | 9, IP9, | motif) ligand 11 | | GAAACATTCTTATGCATCATTTGGT (SEQ ID NO: 825) |
| | | MGC102770, | | | TACGCTATGGGATACTGGCAACAGT (SEQ ID NO: 826) |
| | | SCYB11, | | | GCAACAGTGCACATATTTCATAACC (SEQ ID NO: 827) |
| | | SCYB9B, b-R1 | | | TTCATAACCAAATTAGCAGCACCGG (SEQ ID NO: 828) |
| | | | | | GCAGCACCGGTCTTAATTTGATGTT (SEQ ID NO: 829) |
| | | | | | GGATATGTGTGTTTACTGTACTTTT (SEQ ID NO: 830) |
| | | | | | TTTGTTTTGATCCGTTTGTATAAAT (SEQ ID NO: 831) |
| | | | | | GATAGCAATATCTTGGACACATTTG (SEQ ID NO: 832) |
| | | | | | ATACCTAGCAATCACTTTTACTTTT (SEQ ID NO: 833) |
| | | | | | TTTTACTTTTTGTAATTCTGTCTCT (SEQ ID NO: 834) |
| 211122_s_at | CXCL11 | H174, I-TAC, IP- | chemokine (C—X—C | 6373 | GAGACTTTTCTATGGTTTTGTGACT (SEQ ID NO: 835) |
| | | 9, IP9, | motif) ligand 11 | | GTGACTTTCAACTTTTGTACAGTTA (SEQ ID NO: 836) |
| | | MGC102770, | | | GACAATCAGAATTCCACTGCCCAAA (SEQ ID NO: 837) |
| | | SCYB11, | | | GGCTGGTTACCATCGGAGTTTACAA (SEQ ID NO: 838) |
| | | SCYB9B, b-R1 | | | TGCTTTCACGTTCTTACTTGTTGTA (SEQ ID NO: 839) |
| | | | | | TACATTCATGCATTTCTAGGCTAGA (SEQ ID NO: 840) |
| | | | | | AGAGAACCTTCTAGATTTGATGCTT (SEQ ID NO: 841) |
| | | | | | GTCTCTAGAAGTTATCTGTCTGTAT (SEQ ID NO: 842) |
| | | | | | CTGTCTGTATTGATCTTTATGCTAT (SEQ ID NO: 843) |
| | | | | | GCTATATTACTATCTGTGGTTACAG (SEQ ID NO: 844) |
| | | | | | TACTGGAGTCAAGCCCTTATAAGTC (SEQ ID NO: 845) |
| 209774_x_at | CXCL2 | CINC-2a, GROb, | chemokine (C—X—C | 2920 | AGAGAGACACAGCTGCAGAGGCCAC (SEQ ID NO: 846) |
| | | Gro2, MIP-2, | motif) ligand 2 | | ACCTGGATTGCGCCTAATGTGTTTG (SEQ ID NO: 847) |
| | | MIP-2a, Mgsa-b, | | | TGATTGAATCTACTTGCACACTCTC (SEQ ID NO: 848) |
| | | Mip2, Scyb, | | | GCACACTCTCCCATTATATTTATTG (SEQ ID NO: 849) |
| | | Scyb2 | | | AACCCAAGTTAGTTCAATCCTGATT (SEQ ID NO: 850) |
| | | | | | GAAGGTTTGCAGATATTCTCTAGTC (SEQ ID NO: 851) |
| | | | | | GACATATCACATGTCAGCCACTGTG (SEQ ID NO: 852) |
| | | | | | ATGGCCAGTAAGATCAATGTGACGG (SEQ ID NO: 853) |
| | | | | | TGTGACGGCAGGGAAATGTATGTGT (SEQ ID NO: 854) |
| | | | | | CAGTGTGTGGTCAACATTTCTCATG (SEQ ID NO: 855) |
| | | | | | ATGTTAATTATGCAGTGTTTCCCTC (SEQ ID NO: 856) |
| 217200_x_at | CYB561 | FRRS2 | cytochrome b-561 | 1534 | CTGCTGCCTCTGTTCTGGAGGACGA (SEQ ID NO: 857) |
| | | | | | TTCTGGAGGACGAGCCTTCTCCTTA (SEQ ID NO: 858) |
| | | | | | GCTGCCCATCTTTCCAGGAAGTCAG (SEQ ID NO: 859) |
| | | | | | AGTCAGACAACTAACGATCATCCCC (SEQ ID NO: 860) |
| | | | | | ACATCACTCCAGCCCCATAAAGAGT (SEQ ID NO: 861) |
| | | | | | GTGTCATGTTAGCTGAGTCACCATT (SEQ ID NO: 862) |
| | | | | | TCACCATTTGGCTTCGGCCTGGAAA (SEQ ID NO: 863) |
| | | | | | ACACTGATCGTGTGCGAGGCCAGGA (SEQ ID NO: 864) |
| | | | | | AAGACCATCCTGACTAACAAACACA (SEQ ID NO: 865) |
| | | | | | GTCTCTACGGAATTCCCTGTATTAG (SEQ ID NO: 866) |
| | | | | | GGATGCCTTTTCTGTGATTGGGTGG (SEQ ID NO: 867) |
| 201634_s_at | CYB5B | CYB5-M, | cytochrome b5 type B | 80777 | GTGGTGCCGGACAAAAAACTACATG (SEQ ID NO: 868) |
| | | CYPB5M, | (outer mitochondrial | | CAAAAAACTACATGGCCCTTTCGTG (SEQ ID NO: 869) |
| | | DKFZp686M0619, | membrane) | | GGGAGGGATGAATTGGGGTGATAGA (SEQ ID NO: 870) |
| | | OMB5 | | | GGTGATAGAACCCTGGTGAATTCAG (SEQ ID NO: 871) |
| | | | | | GTGAATTCAGAGTAATCTTTCTTTA (SEQ ID NO: 872) |
| | | | | | GATAGGAGTTTAGAGAAGGCACCAA (SEQ ID NO: 873) |
| | | | | | GAAGGCACCAAAGCTTTCACTTTGG (SEQ ID NO: 874) |
| | | | | | CAAAGCTTTCACTTTGGTTTGGCAC (SEQ ID NO: 875) |
| | | | | | CCTAGCTATCTTTTATTGGTAAAAT (SEQ ID NO: 876) |
| | | | | | TGTATAATTATGTTTGTAGAGCTTT (SEQ ID NO: 877) |
| | | | | | GTTTGTAGAGCTTTACCAAGGAGTT (SEQ ID NO: 878) |
| 200794_x_at | DAZAP2 | KIAA0058, | DAZ associated | 9802 | ATAGGTTGTCTCTGCATACACGAAC (SEQ ID NO: 879) |
| | | MGC14319, | protein 2 | | TACACGAACCTAACCCAAATTTGCT (SEQ ID NO: 880) |
| | | MGC766 | | | GATGTCGTGCAAACTGTACTGTGAA (SEQ ID NO: 881) |
| | | | | | GAGGAGGATGCATTTCAAAAGCTTG (SEQ ID NO: 882) |
| | | | | | GGTTACCATTTTTTGTCAGAGTGTC (SEQ ID NO: 883) |
| | | | | | AGAGTGTCTGATGCGGCCACTCATT (SEQ ID NO: 884) |
| | | | | | GGCTCCCCAGAATTCCTAGACTGGG (SEQ ID NO: 885) |
| | | | | | AATGACTTGAGTCCAGTGAAATCTC (SEQ ID NO: 886) |
| | | | | | GTTTGACTGTACCATTGACTGTTAT (SEQ ID NO: 887) |
| | | | | | AAGTTCAGCGTTGTATGTCTCTCTC (SEQ ID NO: 888) |
| | | | | | CTCTCTCTACACTGTGGTGCACTTA (SEQ ID NO: 889) |
| 208675_s_at | DDOST | AGE-R1, | dolichyl- | 1650 | CATCGTGATCCAGCAGCTCTCAAAT (SEQ ID NO: 890) |
| | | KIAA0115, | diphosphooligosaccharide- | | CTCAAATGGCAAATGGGTCCCCTTT (SEQ ID NO: 891) |
| | | MGC2191, | protein | | GGTCCCCTTTGATGGCGATGACATT (SEQ ID NO: 892) |
| | | OK/SW-cl.45, | glycosyltransferase | | GGAGTTTGTCCGCATTGATCCTTTT (SEQ ID NO: 893) |
| | | OST, OST48, | | | GATCCTTTTGTGAGGACCTTCCTGA (SEQ ID NO: 894) |
| | | WBP1 | | | ACAGTGTTCAGTTCAAGTTGCCCGA (SEQ ID NO: 895) |
| | | | | | GTTGCCCGACGTGTATGGTGTATTC (SEQ ID NO: 896) |
| | | | | | GATTACAACCGGCTAGGCTACACAC (SEQ ID NO: 897) |
| | | | | | CCTGTACTCTTCCACTCAGGTATCC (SEQ ID NO: 898) |
| | | | | | CACACGCAGTATGAGCGCTTCATCC (SEQ ID NO: 899) |
| | | | | | ATGGCACAACTTTACCTCTGTGGGA (SEQ ID NO: 900) |
| 201440_at | DDX23 | MGC8416, | DEAD (Asp-Glu-Ala- | 9416 | AGGACGACGCTGTCGGAGGCAGGGA (SEQ ID NO: 901) |
| | | PRPF28, U5- | Asp) box polypeptide | | GAGAGCAAATTACCACAGCTTCTTG (SEQ ID NO: 902) |
| | | 100K, U5-100KD, | 23 | | TTTGGGATTGCACTGGGCCATCAGC (SEQ ID NO: 903) |
| | | prp28 | | | CCATCAGCTCATGCCAGGCTATGGG (SEQ ID NO: 904) |
| | | | | | TGGGGGCAGCCAGTTGGCATTGCTC (SEQ ID NO: 905) |
| | | | | | CATTGCTCCCCAGACTGAACAGAAA (SEQ ID NO: 906) |
| | | | | | ACTGCAGTAGCATCATTGCCCTAGA (SEQ ID NO: 907) |
| | | | | | GTCATCTGGACAGCTGTTTTCCTGT (SEQ ID NO: 908) |
| | | | | | AGAGTCTTTAGACCTGTGCACAGCC (SEQ ID NO: 909) |
| | | | | | CCAAGGGGTGCTGTATGCTCTAGGC (SEQ ID NO: 910) |
| | | | | | TGAACTGGCTGTGTCCATCTTTGTC (SEQ ID NO: 911) |
| 221885_at | DENND2A | FAM31D, | DENN/MADD domain | 27147 | TTGTGGGACACTACTCTTTGTTCCT (SEQ ID NO: 912) |
| | | KIAA1277 | containing 2A | | CCTGACGTCGGGCGAGCGTGAGGAG (SEQ ID NO: 913) |
| | | | | | GCGTGAGGAGAGAACCCTGCAGCGG (SEQ ID NO: 914) |
| | | | | | TGGAGACTCAGATGTTTCGGGGCTT (SEQ ID NO: 915) |
| | | | | | TCTGTTTGAGGTCCGAGCCCAAGAG (SEQ ID NO: 916) |
| | | | | | AACACTCCCCAGTGGAGAGCACAGC (SEQ ID NO: 917) |
| | | | | | AAGGGAAAACTTCCTCCTAGTGCAG (SEQ ID NO: 918) |
| | | | | | CCTTTCTGAAAGGCTGGGTCCCAGG (SEQ ID NO: 919) |
| | | | | | TCCCAGGTTGTCACGGTGCGGAACT (SEQ ID NO: 920) |
| | | | | | AGAAAGGGAGCCCGAGACCAGGCGT (SEQ ID NO: 921) |
| | | | | | GTGTCGCCGACATGCAAATGGGTTG (SEQ ID NO: 922) |
| 53991_at | DENND2A | FAM31D, | DENN/MADD domain | 27147 | TTTGTTCCTGACGTCGGGCGAGCGT (SEQ ID NO: 923) |
| | | KIAA1277 | containing 2A | | GAGGCCTTCCGCAAAGCTGTCTCCT (SEQ ID NO: 924) |
| | | | | | TGGAGACTCAGATGTTTCGGGGCTT (SEQ ID NO: 925) |
| | | | | | GGTCCGAGCCCAAGAGTATCTGGAA (SEQ ID NO: 926) |
| | | | | | GAGCACAGCGGTGTCAATAAGTTCC (SEQ ID NO: 927) |
| | | | | | GTCAATAAGTTCCTGAAGGGACTAG (SEQ ID NO: 928) |
| | | | | | TTCCTGAAGGGACTAGGCAATAAAA (SEQ ID NO: 929) |
| | | | | | CAAGAAATAACTCTCAGCCTCAAGG (SEQ ID NO: 930) |
| | | | | | TAACTCTCAGCCTCAAGGGAAAACT (SEQ ID NO: 931) |
| | | | | | GGAAAACTTCCTCCTAGTGCAGCCC (SEQ ID NO: 932) |
| | | | | | GTCCCAGGTTGTCACGGTGCGGAAC (SEQ ID NO: 933) |
| | | | | | TCCCAGGTTGTCACGGTGCGGAACT (SEQ ID NO: 934) |
| | | | | | TCTGGCCGAGGCTGGGCTCTTCCCT (SEQ ID NO: 935) |
| | | | | | GGGCTCTTCCCTGGATGAGGACCTG (SEQ ID NO: 936) |
| | | | | | CGTGTCGCCGACATGCAAATGGGTT (SEQ ID NO: 937) |
| | | | | | GCCGACATGCAAATGGGTTGTTTTG (SEQ ID NO: 938) |
| 221081_s_at | DENND2D | FLJ22457, RP5- | DENN/MADD domain | 79961 | TTCTCACTTTTCATCCAGGAAGCCG (SEQ ID NO: 939) |
| | | 1180E21.2 | containing 2D | | AAGAGCAAGAATCCTCCTGCAGGCT (SEQ ID NO: 940) |
| | | | | | GAGCTACACACCATTTCTGGACTTC (SEQ ID NO: 941) |
| | | | | | GGATCAGCAAAACTGTCAGCTCCCA (SEQ ID NO: 942) |
| | | | | | ATCCTCACTCTGAGTCTTGGTATCC (SEQ ID NO: 943) |
| | | | | | GGTGTCTGAGATTTGGATCCCTGGT (SEQ ID NO: 944) |
| | | | | | GACACCATGCTCACAGAACTGGGCT (SEQ ID NO: 945) |
| | | | | | GGCTCAGAGCTCCATTTTTTGCAGA (SEQ ID NO: 946) |
| | | | | | TGGTTAGAAGCTGCTGCAACTGCCC (SEQ ID NO: 947) |
| | | | | | TTTGTGGTCGAAAGGCTCAGCCTCT (SEQ ID NO: 948) |
| | | | | | GCTCAGCCTCTCTACATGAAGTCTG (SEQ ID NO: 949) |
| 218021_at | DHRS4 /// | NRDR; | dehydrogenase/reductase | 10901 | CAGGATGCTCTGGATGGACAAGGAA (SEQ ID NO: 950) |
| | DHRS4L2 | DHRS4L2; SDR- | (SDR family) | 317749 | GCGGATAAGAAGGTTAGGCGAGCCA (SEQ ID NO: 951) |
| | | SRL; humNRDR; | member 4 /// | | TTAGGCGAGCCAGAGGATTGTGCTG (SEQ ID NO: 952) |
| | | FLJ11008; | dehydrogenase/reductase | | GTCTTTCCTGTGCTCTGAAGATGCC (SEQ ID NO: 953) |
| | | SCAD-SRL /// | (SDR family) | | GAAGATGCCAGCTACATCACTGGGG (SEQ ID NO: 954) |
| | | MGC905 | member 4 like 2 | | GTCCCGCCTCTGAGGACCGGGAGAC (SEQ ID NO: 955) |
| | | | | | CCTTACTGTTCACCTCATCAAATCA (SEQ ID NO: 956) |
| | | | | | CCTCATCAAATCAGTTCTGCCCTGT (SEQ ID NO: 957) |
| | | | | | CTGCCGTCAAGGTGGCGTCTTACTC (SEQ ID NO: 958) |
| | | | | | TGTTGTGGCCTTGGGTAAAGGCCTC (SEQ ID NO: 959) |
| | | | | | CCTCCCCTGAGAACACAGGACAGGC (SEQ ID NO: 960) |
| 201385_at | DHX15 | DBP1, DDX15, | DEAH (Asp-Glu-Ala- | 1665 | AAGTTCGAGTTGTGCTCTTCACGTT (SEQ ID NO: 961) |
| | | HRH2, PRP43, | His) box polypeptide | | TGTGCTCTTCACGTTGGTTCGATAA (SEQ ID NO: 962) |
| | | PRPF43, | 15 | | CACGTTGGTTCGATAATGGCCTTTA (SEQ ID NO: 963) |
| | | PrPp43p | | | GTAAATATTCCATTCTGATTTCATA (SEQ ID NO: 964) |
| | | | | | ATTAAACATTTATGCCTCCCTTTTG (SEQ ID NO: 965) |
| | | | | | CCTCCCTTTTGTGTTGACACTGTAG (SEQ ID NO: 966) |
| | | | | | GTTGACACTGTAGCTCATACTGGAA (SEQ ID NO: 967) |
| | | | | | GTGATTATCGACCATGGTATGCATG (SEQ ID NO: 968) |
| | | | | | GGTATGCATGATCGTTGTAATTGTT (SEQ ID NO: 969) |
| | | | | | TTTTTTGTTTCAGTACCAGAGGCAC (SEQ ID NO: 970) |
| | | | | | GTACCAGAGGCACTGACTTCAATAA (SEQ ID NO: 971) |
| 201386_s_at | DHX15 | DBP1, DDX15, | DEAH (Asp-Glu-Ala- | 1665 | GGAGATCATCTGACACTGCTGAACG (SEQ ID NO: 972) |
| | | HRH2, PRP43, | His) box polypeptide | | TGCTGAACGTCTACCATGCTTTTAA (SEQ ID NO: 973) |
| | | PRPF43, | 15 | | CAACTTCATTAACTACAGGTCCCTG (SEQ ID NO: 974) |
| | | PrPp43p | | | GTACGCCAGCAGCTATCTCGAATTA (SEQ ID NO: 975) |
| | | | | | GATTTAATTTGCCTCGTCGAAGTAC (SEQ ID NO: 976) |
| | | | | | GCAGGTGGCACATTTAGAACGAACA (SEQ ID NO: 977) |
| | | | | | AACCAGGTGGTTCAGTTGCATCCCT (SEQ ID NO: 978) |
| | | | | | CCTCTACTGTTCTTGACCACAAACC (SEQ ID NO: 979) |
| | | | | | GGTTGGTGAAAATTGCCCCTCAATA (SEQ ID NO: 980) |
| | | | | | ATGACATGAGCAATTTCCCACAGTG (SEQ ID NO: 981) |
| | | | | | GAGACAGTTGGACCGCATCATTGCC (SEQ ID NO: 982) |
| 210469_at | DLG5 | RP13-39P12.4, | discs, large homolog | 9231 | AGAGGCTTCCTAAGGCTGTTTTCTT (SEQ ID NO: 983) |
| | | KIAA0583, LP- | 5 (Drosophila) | | TTTCTTAGCCGTGGAGAAGCCCGCA (SEQ ID NO: 984) |
| | | DLG, P-DLG5, | | | CTACATGCTCCCAAGTGCTGTCATG (SEQ ID NO: 985) |
| | | PDLG | | | CATGAGCACGTTCCTGACAAGTCAG (SEQ ID NO: 986) |
| | | | | | AGTCAGGTGTTCAGATTGCAGTCCC (SEQ ID NO: 987) |
| | | | | | GGCCAACGTCAGGATTCTTACAGGT (SEQ ID NO: 988) |
| | | | | | GAATGTTAAGCTCACCGATCTTGGC (SEQ ID NO: 989) |
| | | | | | TGCCTGCTCATTTTCACACGTGCAG (SEQ ID NO: 990) |
| | | | | | GCAGTGGTGGGTCTGTCTCATAGCA (SEQ ID NO: 991) |
| | | | | | GTGGGCAGCGGAGGCTAGGGGCCCA (SEQ ID NO: 992) |
| | | | | | GGCAGTCCCGTTTTGCAGCGGGATT (SEQ ID NO: 993) |
| 203301_s_at | DMTF1 | DMP1, DMTF, | cyclin D binding myb- | 9988 | GTAACAAAACCCACCAGAATCTAAG (SEQ ID NO: 994) |
| | | FLJ41265, | like transcription | | CAGAATCTAAGCAGTTTTCACCCCC (SEQ ID NO: 995) |
| | | hDMP1 | factor 1 | | CCCCCTCAGAAACCACTGTCATTAG (SEQ ID NO: 996) |
| | | | | | AGTAATGTTACCTATCCTTGATACC (SEQ ID NO: 997) |
| | | | | | CTATCCTTGATACCATGACCATTTA (SEQ ID NO: 998) |
| | | | | | GAATAGTTTGTCATCCACTTAGTGT (SEQ ID NO: 999) |
| | | | | | CTTAGTGTGTTAGCTGGTGGGGTAC (SEQ ID NO: 1000) |
| | | | | | GGGGTACAATATAACCTCTCATCTC (SEQ ID NO: 1001) |
| | | | | | CTAAGAATCATTCCTGTACTACAGA (SEQ ID NO: 1002) |
| | | | | | GATCTTCACAAAGTTGTCTTTTCAC (SEQ ID NO: 1003) |
| | | | | | CACTGTGTTTTGTCAACGTGAAATT (SEQ ID NO: 1004) |
| 222070_at | DND1 | RBMS4; | dead end homolog 1 | 373863 | TGCTGGGACAGGGACCTATGGCACC (SEQ ID NO: 1005) |
| | | MGC34750 | (zebrafish) | | GGCAGCTTAGGTTTGGGTTAAGTTG (SEQ ID NO: 1006) |
| | | | | | TAAGTTGTGGTGAGGGGCCTTGCCC (SEQ ID NO: 1007) |
| | | | | | GGGTCCAACCTGACCCAGTGATCTT (SEQ ID NO: 1008) |
| | | | | | TTCTTTATTGTCCTGATTTGTCCTC (SEQ ID NO: 1009) |
| | | | | | TGATTTGTCCTCTTTGTTGGTTTTT (SEQ ID NO: 1010) |
| | | | | | GAAGGGCAGCTGAGCCAAAGGGGTC (SEQ ID NO: 1011) |
| | | | | | GGGTCAGAAATTCTGCCCTTTGCCT (SEQ ID NO: 1012) |
| | | | | | CCTCCACCACATGGCATTCTGGTTT (SEQ ID NO: 1013) |
| | | | | | CATGGCATTCTGGTTTTGGTTTCTG (SEQ ID NO: 1014) |
| | | | | | GGTCTTTCTATGCTGGTTGTATTTA (SEQ ID NO: 1015) |
| 57739_at | DND1 | RBMS4; | dead end homolog 1 | 373863 | TCAGCCTCCCTGCTGGGACAGGGAC (SEQ ID NO: 1016) |
| | | MGC34750 | (zebrafish) | | CCCTGCTGGGACAGGGACCTATGGC (SEQ ID NO: 1017) |
| | | | | | AGCTTAGCATGAATCTTCTTTATTG (SEQ ID NO: 1018) |
| | | | | | GCTTAGCATGAATCTTCTTTATTGT (SEQ ID NO: 1019) |
| | | | | | AGCATGAATCTTCTTTATTGTCCTG (SEQ ID NO: 1020) |
| | | | | | GCATGAATCTTCTTTATTGTCCTGA (SEQ ID NO: 1021) |
| | | | | | GCAGCTGAGCCAAAGGGGTCAGAAA (SEQ ID NO: 1022) |
| | | | | | GGGTCAGAAATTCTGCCCTTTGCCT (SEQ ID NO: 1023) |
| | | | | | GGTCAGAAATTCTGCCCTTTGCCTC (SEQ ID NO: 1024) |
| | | | | | CCACCACATGGCATTCTGGTTTTGG (SEQ ID NO: 1025) |
| | | | | | CACCACATGGCATTCTGGTTTTGGT (SEQ ID NO: 1026) |
| | | | | | ACCACATGGCATTCTGGTTTTGGTT (SEQ ID NO: 1027) |
| | | | | | CCACATGGCATTCTGGTTTTGGTTT (SEQ ID NO: 1028) |
| | | | | | CACATGGCATTCTGGTTTTGGTTTC (SEQ ID NO: 1029) |
| | | | | | ACATGGCATTCTGGTTTTGGTTTCT (SEQ ID NO: 1030) |
| | | | | | CATGGCATTCTGGTTTTGGTTTCTG (SEQ ID NO: 1031) |
| 212538_at | DOCK9 | RP11-155N3.2, | dedicator of | 23348 | GTGAACCAGGAGATTTAGTGCTTTT (SEQ ID NO: 1032) |
| | | DKFZp686C11110, | cytokinesis 9 | | AAGCAGTTTAGAACCAAAGGCCTAT (SEQ ID NO: 1033) |
| | | DKFZp686D2047, | | | AAGGCCTATATTAATAACCGCAACT (SEQ ID NO: 1034) |
| | | DKFZp686N04132, | | | TAACCGCAACTATGCTGAAAAGTAC (SEQ ID NO: 1035) |
| | | FLJ11949, | | | ATCATTGTTAATACAGTCCTGGCAT (SEQ ID NO: 1036) |
| | | FLJ16744, | | | AGTCCTGGCATTCTGTACATATATG (SEQ ID NO: 1037) |
| | | FLJ44528, | | | AATACTCACATGGGCTTATGCATTA (SEQ ID NO: 1038) |
| | | FLJ45282, | | | TGTGCTGTTCCAGTATATGCAATAC (SEQ ID NO: 1039) |
| | | FLJ45601, | | | GGAGATGTATACAGTCTTTACTATA (SEQ ID NO: 1040) |
| | | KIAA1058, | | | AATCCTGTGGTGAATGGTGGTGTAC (SEQ ID NO: 1041) |
| | | KIAA1085, ZIZ1, | | | AGCTGTCACCATGTTATATTTTCTT (SEQ ID NO: 1042) |
| | | ZIZIMIN1 | | | |
| 205595_at | DSG3 | CDHF6, | desmoglein 3 | 1830 | CCATCCCATAGAAGTCCAGCAGACA (SEQ ID NO: 1043) |
| | | DKFZp686P23184, | (pemphigus vulgaris | | AGTCAAGGAGCTTCTGCTTTGTCCG (SEQ ID NO: 1044) |
| | | PVA | antigen) | | CTGACCCTCTGCAGCATGGTAACTA (SEQ ID NO: 1045) |
| | | | | | AGTAACGGAGACTTACTCGGCTTCT (SEQ ID NO: 1046) |
| | | | | | AGAAAGGGTGATCTGTCCCATTTCC (SEQ ID NO: 1047) |
| | | | | | CCATTTCCAGTGTTCCTGGCAACCT (SEQ ID NO: 1048) |
| | | | | | GCCCAACGCAGCTACGAGGGTCACA (SEQ ID NO: 1049) |
| | | | | | GAGGGTCACATACTATGCTCTGTAC (SEQ ID NO: 1050) |
| | | | | | CCTTGCTCCCGTCTAATATGACCAG (SEQ ID NO: 1051) |
| | | | | | TGAGCTGGAATACCACACTGACCAA (SEQ ID NO: 1052) |
| | | | | | GTTGTCACTCCTAATTCTCAAGTAC (SEQ ID NO: 1053) |
| 201323_at | EBNA1BP2 | EBP2, NOBP, | EBNA1 binding | 10969 | TGGATTTCCTTGAGGGAGATCAGAA (SEQ ID NO: 1054) |
| | | P40 | protein 2 | | AAACCTCTGGCACAGCGCAAGAAGG (SEQ ID NO: 1055) |
| | | | | | GGAGCCAAAGGCCAGCAGATGAGGA (SEQ ID NO: 1056) |
| | | | | | GGCTCAAAGTGGAACACTCGGGAGA (SEQ ID NO: 1057) |
| | | | | | CTTCCGGGCCAAGACAGCTCATGGC (SEQ ID NO: 1058) |
| | | | | | GACAGCTCATGGCAGAGGCCTCAAG (SEQ ID NO: 1059) |
| | | | | | GCCTCAAGAGGCCTGGCAAGAAAGG (SEQ ID NO: 1060) |
| | | | | | GACTCGCAATTTCACGACACACTTT (SEQ ID NO: 1061) |
| | | | | | ACACTTTGATCCCTTCTGTTGGTGT (SEQ ID NO: 1062) |
| | | | | | GAAGTTACTTTCCATTGCTATCTAT (SEQ ID NO: 1063) |
| | | | | | AGACATTGAGTTCAAATTGCCTTCA (SEQ ID NO: 1064) |
| 200789_at | ECH1 | HPXEL | enoyl Coenzyme A | 1891 | ATGTAGGAACACTGGAGCGCCTGCC (SEQ ID NO: 1065) |
| | | | hydratase 1, | | AGGTCATCGGGAACCAGAGCCTGGT (SEQ ID NO: 1066) |
| | | | peroxisomal | | CCAGAGCCTGGTCAACGAGCTGGCC (SEQ ID NO: 1067) |
| | | | | | CCTTCACCGCCCACAAGATGATGGC (SEQ ID NO: 1068) |
| | | | | | GCTGACGAGGCCCTGGACAGTGGGC (SEQ ID NO: 1069) |
| | | | | | TCAGCCGGGTGTTCCCAGACAAAGA (SEQ ID NO: 1070) |
| | | | | | GACCACCGTGTTGGTGCAGAGCACC (SEQ ID NO: 1071) |
| | | | | | GCAGAGCACCAAGGTCAACCTGCTG (SEQ ID NO: 1072) |
| | | | | | GAACATGAGCATGCTGCAGACCCAA (SEQ ID NO: 1073) |
| | | | | | GTCCAGCCCACGACTGAGAACAAGG (SEQ ID NO: 1074) |
| | | | | | GATGACAGTTGTTTCTATGCCTTCT (SEQ ID NO: 1075) |
| 218973_at | EFTUD1 | FAM42A, | elongation factor Tu | 79631 | CTGCAAGTGAAACCTCAGCGCCTGA (SEQ ID NO: 1076) |
| | | FLJ13119, | GTP binding domain | | AGCGCCTGATGGCAGCTATGTACAC (SEQ ID NO: 1077) |
| | | HsT19294, RIA1 | containing 1 | | ACTGGTGATGTTCTCGGTCGAGTCT (SEQ ID NO: 1078) |
| | | | | | GTCGAGTCTATGCTGTCTTGTCAAA (SEQ ID NO: 1079) |
| | | | | | GACATGTTCATCATCAAGGCTGTGC (SEQ ID NO: 1080) |
| | | | | | GCCAGCCCACAACTAGTATTCAGCC (SEQ ID NO: 1081) |
| | | | | | TGGGAGATCATTCCCAGTGACCCCT (SEQ ID NO: 1082) |
| | | | | | CCCTTCTGGGTGCCAACTACTGAGG (SEQ ID NO: 1083) |
| | | | | | TGACTCTGAGAACCAAGCCCGGAAG (SEQ ID NO: 1084) |
| | | | | | AGCTACCTACTACTGGTGGATTCTT (SEQ ID NO: 1085) |
| | | | | | GCCACATTATCTCTGTTTATTCACT (SEQ ID NO: 1086) |
| 201984_s_at | EGFR | Dmel_CG10079, | epidermal growth | 1956 | CTCAAAGAGTATATGTTCCCTCCAG (SEQ ID NO: 1087) |
| | | C-erb, CG10079, | factor receptor | | CCTCCTTACGCTTTGTCACACAAAA (SEQ ID NO: 1088) |
| | | D-EGFR, D-Egf, | (erythroblastic | | AAAGTGTCTCTGCCTTGAGTCATCT (SEQ ID NO: 1089) |
| | | DER, DER flb, | leukemia viral (v-erb- | | GAGTCATCTATTCAAGCACTTACAG (SEQ ID NO: 1090) |
| | | DER/EGFR, | b) oncogene | | GCCACAACAGGGCATTTTACAGGTG (SEQ ID NO: 1091) |
| | | DER/faint little | homolog, avian) | | GTGCCCTGTAACCTGACTGGTTAAC (SEQ ID NO: 1092) |
| | | ball, DER/top, | | | GGTTAACAGCAGTCCTTTGTAAACA (SEQ ID NO: 1093) |
| | | DER/torpedo, | | | TAAACTCTCCTAGTCAATATCCACC (SEQ ID NO: 1094) |
| | | Degfr, DmHD-33, | | | ATCCACCCCATCCAATTTATCAAGG (SEQ ID NO: 1095) |
| | | EFG-R, EGF-R, | | | TCAGCCTACAGTTATGTTCAGTCAC (SEQ ID NO: 1096) |
| | | EK2-6, Egf, El, | | | TGACTCCCAGATCAGTCAGAGCCCC (SEQ ID NO: 1097) |
| | | Elp, Elp-1, Elp- | | | |
| | | B1, Elp-B1RB1, | | | |
| | | HD-33, | | | |
| | | Torpedo/DER, | | | |
| | | Torpedo/Egfr, c- | | | |
| | | erbB, d-egf-r, | | | |
| | | dEGFR1, flb, | | | |
| | | I(2)05351, | | | |
| | | I(2)09261, | | | |
| | | I(2)57DEFa, | | | |
| | | I(2)57EFa, | | | |
| | | I(2)57Ea, pnt, | | | |
| | | top, top/DER, | | | |
| | | top/flb | | | |
| 200595_s_at | EIF3A | EIF-3A | eukaryotic translation | 8661 | GAAGACCCTTTAAAGCAGTGAATCT (SEQ ID NO: 1098) |
| | | | initiation factor 3, | | GAAACAATTTTCACACCCTTAAGTG (SEQ ID NO: 1099) |
| | | | subunit A | | GTGGTTGATACGTACCTATTTTAGG (SEQ ID NO: 1100) |
| | | | | | ATTACTGCGCAAGTGTGAATCCAAA (SEQ ID NO: 1101) |
| | | | | | ATTATCGCTGAGTTTTTTTCTGTTG (SEQ ID NO: 1102) |
| | | | | | ATAGCAAACTGCTTTTCCATTAATG (SEQ ID NO: 1103) |
| | | | | | AATGGAGAATTCATGCCTTTCAAGC (SEQ ID NO: 1104) |
| | | | | | GTAATGACTGTGTTGACTTCAATTT (SEQ ID NO: 1105) |
| | | | | | GACTTCAATTTTGGAGCGCAGTAGC (SEQ ID NO: 1106) |
| | | | | | TGAACTATTTGGTCTCATTGAAGCC (SEQ ID NO: 1107) |
| | | | | | GGTCTCATTGAAGCCAACACAGAAC (SEQ ID NO: 1108) |
| 221094_s_at | ELP3 | FLJ10422, KAT9 | elongation protein 3 | 55140 | GGTGGCTGGGAAACATTCTTGTCAT (SEQ ID NO: 1109) |
| | | | homolog (S. cerevisiae) | | CAAGACATTTTGATTGGCCTCCTAC (SEQ ID NO: 1110) |
| | | | | | GGCCTCCTACGATTACGCAAGTGTT (SEQ ID NO: 1111) |
| | | | | | ATGGGTCTGGGAAAATCGCTGTGAT (SEQ ID NO: 1112) |
| | | | | | GATATCAGGGGTCGGCACCAGGAAT (SEQ ID NO: 1113) |
| | | | | | TCGGCTACAGATTACAAGGCCCGTA (SEQ ID NO: 1114) |
| | | | | | AGATGCTGAAATAATGGCCACACCA (SEQ ID NO: 1115) |
| | | | | | ATCCTCCCTGGCAGAACACGGAGAA (SEQ ID NO: 1116) |
| | | | | | AGAGCAAATGGGGGGCTTCACCCTC (SEQ ID NO: 1117) |
| | | | | | GAGACTGGAAACTGCCTTCAAGGCC (SEQ ID NO: 1118) |
| | | | | | AAATCACTTGCGTTTTTGAGGCTTA (SEQ ID NO: 1119) |
| 213895_at | EMP1 | CL-20, EMP-1, | epithelial membrane | 2012 | AAGGACTGGTATCTTTCTGTGAGCA (SEQ ID NO: 1120) |
| | | TMP | protein 1 | | GATAAAGACTGCATATCCTTGTGTC (SEQ ID NO: 1121) |
| | | | | | ATTGCATTGATTCTTGATGCTTTCT (SEQ ID NO: 1122) |
| | | | | | GATGCTTTCTTAGAGGCCTACATGA (SEQ ID NO: 1123) |
| | | | | | GATTTCTTAGATTGCTCTGATAAAC (SEQ ID NO: 1124) |
| | | | | | AGAGGGAACTTTTGTCAGACTCTGC (SEQ ID NO: 1125) |
| | | | | | CAGACTCTGCAACAAACTCCTAGCT (SEQ ID NO: 1126) |
| | | | | | AACTCCTAGCTCTATCCAGAGTGTC (SEQ ID NO: 1127) |
| | | | | | TCCAGAGTGTCCTCTGCTGCTAAGA (SEQ ID NO: 1128) |
| | | | | | GTATCTTTCTCCTCAAAAGCCTGGA (SEQ ID NO: 1129) |
| | | | | | GGGGGTGCATTAGTCAGAATTCTCC (SEQ ID NO: 1130) |
| 214053_at | ERBB4 | HER4, | v-erb-a erythroblastic | 2066 | ATTGGCCTGTGATTGTTTCTTTTTT (SEQ ID NO: 1131) |
| | | MGC138404, | leukemia viral | | GTGATTCTGTGTTCAGCACTATTGT (SEQ ID NO: 1132) |
| | | p180erbB4 | oncogene homolog 4 | | TGTGATGTGTTCAACCTCTGCACTC (SEQ ID NO: 1133) |
| | | | (avian) | | TTTTAGTATACTTTCTCTTATTCTT (SEQ ID NO: 1134) |
| | | | | | TAGGCTTTTCCGTTAGTTCTCAAGG (SEQ ID NO: 1135) |
| | | | | | TCAAGGATCCTCTTTTGGCTCTTGG (SEQ ID NO: 1136) |
| | | | | | TAGAATGCGAACTGCTTTGCCTCAT (SEQ ID NO: 1137) |
| | | | | | TTGCCTCATTCCATACTGATCATCC (SEQ ID NO: 1138) |
| | | | | | TACTGATCATCCCAGCTGAACAATT (SEQ ID NO: 1139) |
| | | | | | ATTTGAAAACTGTTCTGCCTTTTTG (SEQ ID NO: 1140) |
| | | | | | TCTGCCTTTTTGTTACATGAATCTG (SEQ ID NO: 1141) |
| 201216_at | ERP29 | C12orf8, ERp28, | endoplasmic | 10961 | GACTTTGAGAACCCAGTCCCATACA (SEQ ID NO: 1142) |
| | | ERp31, PDI-DB | reticulum protein 29 | | TTAAGGTTGGAGCCATCCAGCGCTG (SEQ ID NO: 1143) |
| | | | | | TACCTAGGTATGCCTGGTTGCCTGC (SEQ ID NO: 1144) |
| | | | | | TGGCCGGGGAGTTCATCAGGGCCTC (SEQ ID NO: 1145) |
| | | | | | GTGGGCCGAGCAATACCTGAAGATC (SEQ ID NO: 1146) |
| | | | | | GACACGGATCGCCAGGCTGATTGAG (SEQ ID NO: 1147) |
| | | | | | AAGAGCTTAAACATCCTGACTGCCT (SEQ ID NO: 1148) |
| | | | | | AAGGCTGTCTGTGATTTTCCAGGGT (SEQ ID NO: 1149) |
| | | | | | GAGGGGAGAGTTAACCTGCTGGCTG (SEQ ID NO: 1150) |
| | | | | | CTGGCTGTGAGTCCCTTGTGGAATA (SEQ ID NO: 1151) |
| | | | | | TGGTACTAACCCACGATTCTGAGCC (SEQ ID NO: 1152) |
| 221911_at | ETV1 | DKFZp781L0674, | ets variant gene 1 | 2115 | TAATATTCTCTTTCATGCTGAATTT (SEQ ID NO: 1153) |
| | | ER81, | | | TGCTGAATTTACTATGACCATTTAT (SEQ ID NO: 1154) |
| | | MGC104699, | | | TAAGCAGTGCAGTTAACTACAGATA (SEQ ID NO: 1155) |
| | | MGC120533, | | | AACTACAGATAGCATTTCAGGACAA (SEQ ID NO: 1156) |
| | | MGC120534 | | | AGCTTACGCCATGCTATGCTATAAG (SEQ ID NO: 1157) |
| | | | | | GAATATGAGGAAGTTGCTGTATGAC (SEQ ID NO: 1158) |
| | | | | | GCTGTATGACATAGTGCTGGCACTG (SEQ ID NO: 1159) |
| | | | | | GTGCTGGCACTGATATTATCCATCA (SEQ ID NO: 1160) |
| | | | | | CTGATATTATCCATCATCTCTTTTT (SEQ ID NO: 1161) |
| | | | | | GGGTATGTTGTTTCATTCACCTTGA (SEQ ID NO: 1162) |
| | | | | | TAGAATCTCTGAATAGCTCGCTAAA (SEQ ID NO: 1163) |
| 215947_s_at | FAM136A | FLJ14668 | family with sequence | 84908 | AGAGAAGGGGGTTTTGATTGTGATA (SEQ ID NO: 1164) |
| | | | similarity 136, | | GAGCAGTTGGCTACTTGATTACAAC (SEQ ID NO: 1165) |
| | | | member A | | TTGGGCTAGGATGAGCTGACTCCCT (SEQ ID NO: 1166) |
| | | | | | ATGAGCTGACTCCCTTAGAGCAAAG (SEQ ID NO: 1167) |
| | | | | | GCAAAGGAGAGACAGCCCCCATTAC (SEQ ID NO: 1168) |
| | | | | | AAATACCATTTTTGCCTGGGGCTTG (SEQ ID NO: 1169) |
| | | | | | CCAGCATGGCACCTTATTGTTTTGA (SEQ ID NO: 1170) |
| | | | | | AGCAACTTCGTTGAATTTTCACCAA (SEQ ID NO: 1171) |
| | | | | | GAATTTTCACCAACTTATTACTTGA (SEQ ID NO: 1172) |
| | | | | | TATAATATAGCCTGTCCGTTTGCTG (SEQ ID NO: 1173) |
| | | | | | GCTGTGATATATTTTCCTAGTGGTT (SEQ ID NO: 1174) |
| 221774_x_at | FAM48A | RGD1307812 | family with sequence | 55578 | ATACTTCAAGTCTCAGGCCCTTAAA (SEQ ID NO: 1175) |
| | | | similarity 48, member A | | CTTAAATCTACTCCAGCTTCCAGGT (SEQ ID NO: 1176) |
| | | | | | TATTTTTAACACTCTGCAGCAGCAG (SEQ ID NO: 1177) |
| | | | | | GTAGTCCTCAACAGCCAGGGGAGCA (SEQ ID NO: 1178) |
| | | | | | CAAGAACAGGCCTTATCTGCTCAGC (SEQ ID NO: 1179) |
| | | | | | CAGTCACAGGCAGCTGCAGTTGCGA (SEQ ID NO: 1180) |
| | | | | | GCAGTTGCGATTCTTGCAGCATCAA (SEQ ID NO: 1181) |
| | | | | | GCAGCAGCAGCACAAACAGCTCAGC (SEQ ID NO: 1182) |
| | | | | | AGCTCAGCTACATCATCATCGGCAT (SEQ ID NO: 1183) |
| | | | | | TCATCGGCATACAGGCAGCCAGTCA (SEQ ID NO: 1184) |
| | | | | | GTCTTGCATTACTTTTTGTTCCTTT (SEQ ID NO: 1185) |
| 218126_at | FAM82C | RMD3; | family with sequence | 55177 | CTTTTTTCCTTAGACCTTGCTGAGA (SEQ ID NO: 1186) |
| | | FAM82A2; | similarity 82, member C | | ACCACACAAATCTGTCTCCTGGGTC (SEQ ID NO: 1187) |
| | | FAM82C; hRMD- | | | TACCACTCCCCATTAGTTAATTTAT (SEQ ID NO: 1188) |
| | | 3; ptpip51; | | | GTTGTTCTCTCCCTTGAGTAATCTC (SEQ ID NO: 1189) |
| | | FLJ10579 | | | ACCTGCCCCAGGATTACACATGGGT (SEQ ID NO: 1190) |
| | | | | | GGTAGAGCCTGCAAGACCTGAGACC (SEQ ID NO: 1191) |
| | | | | | GACCTGAGACCTTCCAATTGCTGGT (SEQ ID NO: 1192) |
| | | | | | CAGAGTGGCCCACAGACATTGCTTT (SEQ ID NO: 1193) |
| | | | | | GAATTCTACCTGTATTCCAGGGCTG (SEQ ID NO: 1194) |
| | | | | | AGGGCTGGACCACTTGATAACTTCC (SEQ ID NO: 1195) |
| | | | | | AACTTCCAGTGTCCTGGCAGCTTTT (SEQ ID NO: 1196) |
| 210950_s_at | FDFT1 | DGPT, ERG9, | farnesyl-diphosphate | 2222 | GAACTTATAACCAATGCACTGCACC (SEQ ID NO: 1197) |
| | | SQS, SS | farnesyltransferase 1 | | TGCACCACATCCCAGATGTCATCAC (SEQ ID NO: 1198) |
| | | | | | TCACCTACCTTTCGAGACTCAGAAA (SEQ ID NO: 1199) |
| | | | | | TTCCACAGGTGATGGCCATTGCCAC (SEQ ID NO: 1200) |
| | | | | | TTGCCACTTTGGCTGCCTGTTATAA (SEQ ID NO: 1201) |
| | | | | | GATGGATGCCACCAATATGCCAGCT (SEQ ID NO: 1202) |
| | | | | | TTATCATAGAATCCCCGACTCAGAC (SEQ ID NO: 1203) |
| | | | | | CTCAGACCCATCTTCTAGCAAAACA (SEQ ID NO: 1204) |
| | | | | | AACTGTCAGCTGATTTCCCGAAGCC (SEQ ID NO: 1205) |
| | | | | | ACCTGTCGTTTGTCATGCTTTTGGC (SEQ ID NO: 1206) |
| | | | | | TTGTCCATAGCTGAAGTCCACCATA (SEQ ID NO: 1207) |
| 217518_at | FER1L3 | RP11-624L12.2, | fer-1-like 3, myoferlin | 26509 | GGGTGGGTGCTAATGAGCAGGGCCC (SEQ ID NO: 1208) |
| | | FLJ36571, | (C. elegans) | | AGAGCCCTCTTGCATGAGTTTCGGC (SEQ ID NO: 1209) |
| | | FLJ90777, MYOF | | | GTTACGTGACTGCCACATTGGGGCT (SEQ ID NO: 1210) |
| | | | | | CATTGGGGCTTGGAGGCATCTGGCA (SEQ ID NO: 1211) |
| | | | | | GAATGGGCTGGCACCACACTAATTA (SEQ ID NO: 1212) |
| | | | | | AGGCCACGATGATCCAGTTTGACTC (SEQ ID NO: 1213) |
| | | | | | GACAAGCGACTGAGCTAGGCACGGC (SEQ ID NO: 1214) |
| | | | | | CTAGGCACGGCTGACTAGCTCTGAG (SEQ ID NO: 1215) |
| | | | | | AGCTCTGAGCTTTCTGTTCATGTTT (SEQ ID NO: 1216) |
| | | | | | ATTCTTCATTCAATTTTCAGCCTGT (SEQ ID NO: 1217) |
| | | | | | TTCAGCCTGTAGTGTCCTCAAGCAG (SEQ ID NO: 1218) |
| 206404_at | FGF9 | GAF, HBFG-9, | fibroblast growth | 2254 | GTGGGTTCTTATTGATTCGCTGTGT (SEQ ID NO: 1219) |
| | | MGC119914, | factor 9 (glia- | | CTCCACTGTTGCCAAACTTTGTCGC (SEQ ID NO: 1220) |
| | | MGC119915 | activating factor) | | AGGGCCACTTGCTTGATTTATCATG (SEQ ID NO: 1221) |
| | | | | | GAGACTGAGCGCTAGGAGTGTGTGT (SEQ ID NO: 1222) |
| | | | | | CTGCGGCCTGATGCATGCTGGAAAA (SEQ ID NO: 1223) |
| | | | | | GACACGCTTTTCATTTCTGATCAGT (SEQ ID NO: 1224) |
| | | | | | TTCATCCTATATCAGCACAGCTGCC (SEQ ID NO: 1225) |
| | | | | | CAGCTGCCATACTTCGACTTATCAG (SEQ ID NO: 1226) |
| | | | | | ATCAGGATTCTGGCTGGTGGCCTGC (SEQ ID NO: 1227) |
| | | | | | TGCGCGAGGGTGCAGTCTTACTTAA (SEQ ID NO: 1228) |
| | | | | | GTTAATTCTCACTGGTATCATCGCA (SEQ ID NO: 1229) |
| 219390_at | FKBP14 | FKBP22; | FK506 binding | 55033 | CATTGAGACATGCTACCTAGGACTT (SEQ ID NO: 1230) |
| | | FLJ20731 | protein 14, 22 kDa | | GCTACCTAGGACTTAAGCTGATGAA (SEQ ID NO: 1231) |
| | | | | | AGCTGATGAAGCTTGGCTCCTAGTG (SEQ ID NO: 1232) |
| | | | | | TTGGCTCCTAGTGATTGGTGGCCTA (SEQ ID NO: 1233) |
| | | | | | GTGATTGGTGGCCTATTATGATAAA (SEQ ID NO: 1234) |
| | | | | | AATATTTACTTCTTAAGGCTAGCGG (SEQ ID NO: 1235) |
| | | | | | AGGCTAGCGGAATATCCTTCCTGGT (SEQ ID NO: 1236) |
| | | | | | TATCCTTCCTGGTTCTTTAATGGGT (SEQ ID NO: 1237) |
| | | | | | GGTTCTTTAATGGGTAGTCTATAGT (SEQ ID NO: 1238) |
| | | | | | GTAAACCAGTCTACATTTTCCCATT (SEQ ID NO: 1239) |
| | | | | | CTGTCTCATCAAAAACTGAAGTTAG (SEQ ID NO: 1240) |
| 58780_s_at | FLJ10357 | SOLO | hypothetical protein | 55701 | CTGGAGTCCCTGGTGACTCCATTCT (SEQ ID NO: 1241) |
| | | | FLJ10357 | | GAGTCCCTGGTGACTCCATTCTGAG (SEQ ID NO: 1242) |
| | | | | | GTCCCTGGTGACTCCATTCTGAGGT (SEQ ID NO: 1243) |
| | | | | | TCCCTGGTGACTCCATTCTGAGGTG (SEQ ID NO: 1244) |
| | | | | | CTGGTGACTCCATTCTGAGGTGTCA (SEQ ID NO: 1245) |
| | | | | | GGTGACTCCATTCTGAGGTGTCACA (SEQ ID NO: 1246) |
| | | | | | GACTCCATTCTGAGGTGTCACAAGC (SEQ ID NO: 1247) |
| | | | | | CTCCATTCTGAGGTGTCACAAGCAA (SEQ ID NO: 1248) |
| | | | | | TCCATTCTGAGGTGTCACAAGCAAT (SEQ ID NO: 1249) |
| | | | | | ATTCTGAGGTGTCACAAGCAATGAA (SEQ ID NO: 1250) |
| | | | | | TTCTGAGGTGTCACAAGCAATGAAG (SEQ ID NO: 1251) |
| | | | | | TCTGAGGTGTCACAAGCAATGAAGC (SEQ ID NO: 1252) |
| | | | | | TGAGGTGTCACAAGCAATGAAGCTA (SEQ ID NO: 1253) |
| | | | | | AGGTGTCACAAGCAATGAAGCTATG (SEQ ID NO: 1254) |
| | | | | | GTGTGACAGGGGAACCGTAGACTTT (SEQ ID NO: 1255) |
| | | | | | TGTGACAGGGGAACCGTAGACTTTA (SEQ ID NO: 1256) |
| 220912_at | FLJ11827 | FLJ11827 | hypothetical protein | 80163 | CCACCCAAATGTCCTTCAAGGGGCG (SEQ ID NO: 1257) |
| | | | FLJ11827 | | GTGATACATCCATACCATAGACTAC (SEQ ID NO: 1258) |
| | | | | | CATAGACTACTCCCCAGCAATAAAA (SEQ ID NO: 1259) |
| | | | | | AAATCATTCGTGCAACAACTTGGAT (SEQ ID NO: 1260) |
| | | | | | TGCTGAGTGAAAAACACCAATCCTA (SEQ ID NO: 1261) |
| | | | | | GGGCAACACAAGGGTTCCTTATAGT (SEQ ID NO: 1262) |
| | | | | | GTGCCTTGACTGTGGCGATGATTAC (SEQ ID NO: 1263) |
| | | | | | GAACTACCACACAATCAAAGGACTG (SEQ ID NO: 1264) |
| | | | | | AGTGGATGACATCTATCTGAATATC (SEQ ID NO: 1265) |
| | | | | | ATATCCTGGTTGTGACATTGTGGTA (SEQ ID NO: 1266) |
| | | | | | GTAAGGGGTACACGGGATAATTCTG (SEQ ID NO: 1267) |
| 219182_at | FLJ22167 | ALYE870, | hypothetical protein | 79583 | TTACCCTCGTGGCTAAGCAAGTGTC (SEQ ID NO: 1268) |
| | | PRO1886 | FLJ22167 | | GCACACGGAAGATGGCTTGTTCAGC (SEQ ID NO: 1269) |
| | | | | | ACCTCCTGAGGATGTGGGCAGTCTC (SEQ ID NO: 1270) |
| | | | | | GCAGTCTCCTCCAAGAACACATGGA (SEQ ID NO: 1271) |
| | | | | | ATCCCAAGCAGGTCATTGCCACTGG (SEQ ID NO: 1272) |
| | | | | | TGCCACTGGAAGGACATGGCCCCGG (SEQ ID NO: 1273) |
| | | | | | GAAACACACCCCTCAGTGTGTGCCT (SEQ ID NO: 1274) |
| | | | | | GTGCCTCAGTTTACTTTGGAGATCA (SEQ ID NO: 1275) |
| | | | | | GATCAGTTGTCGTTTTTAGTGCTCC (SEQ ID NO: 1276) |
| | | | | | TTTTAGTGCTCCTTTAGGCTTACTA (SEQ ID NO: 1277) |
| | | | | | GCAGAGGAATTCCCTAACACTGACC (SEQ ID NO: 1278) |
| 212546_s_at | FRYL | FLJ16177; | FRY-like | 285527 | AGACCTGCAAAGCTGCTTGGATTTC (SEQ ID NO: 1279) |
| | | KIAA0826; | | | TGAAAACCTAACCTGCAATTGATGC (SEQ ID NO: 1280) |
| | | DKFZp686E205 | | | GATGCTTAATCATCCATCCACATGA (SEQ ID NO: 1281) |
| | | | | | CATGAACATGCAGTCAGCTATACGC (SEQ ID NO: 1282) |
| | | | | | GCTATACGCATCAAGACTCGTTTGC (SEQ ID NO: 1283) |
| | | | | | GGTGATAACGTCTCAGAGCATGCCT (SEQ ID NO: 1284) |
| | | | | | GAGCATGCCTAAAAGAGCACTGCAA (SEQ ID NO: 1285) |
| | | | | | TTGGAATGCTGCTCAGTTCTCTGAT (SEQ ID NO: 1286) |
| | | | | | TTCTCTGATCAGTGCTTATGTTATG (SEQ ID NO: 1287) |
| | | | | | TAACCAAAGTAGATGCCTGCAGAGA (SEQ ID NO: 1288) |
| | | | | | GTATGCTGCCTGTCAGCTATTCTCA (SEQ ID NO: 1289) |
| 219683_at | FZD3 | Fz-3, hFz3 | frizzled homolog 3 | 7976 | AATCCTAAATGTGTGGTGACTGCTT (SEQ ID NO: 1290) |
| | | | (Drosophila) | | GTGACTGCTTTGTAGTGAACTTTCA (SEQ ID NO: 1291) |
| | | | | | AACATTCTGGTAGCTCAGTTAATAA (SEQ ID NO: 1292) |
| | | | | | TTCTATGCAAGGTTTACTTCTCAGA (SEQ ID NO: 1293) |
| | | | | | GAACAGTAGGACTTTGTAGTTTTAT (SEQ ID NO: 1294) |
| | | | | | GAAAGGTTCTCTTAAAATTCTATCG (SEQ ID NO: 1295) |
| | | | | | GATATTCAGGGTTTGGATTAGCAGT (SEQ ID NO: 1296) |
| | | | | | AGAGATGGGCATTGTTTCCCCTATA (SEQ ID NO: 1297) |
| | | | | | GTTTCCCCTATAATTGTGCTGTTTT (SEQ ID NO: 1298) |
| | | | | | TTCTGGCTGTGTTTTTATAACTTAT (SEQ ID NO: 1299) |
| | | | | | TTAATTTGTAGCCATCTTTTCCCAT (SEQ ID NO: 1300) |
| 206335_at | GALNS | FLJ17434, | galactosamine (N- | 2588 | CAGGGGGACTGCACAATTCCACCTG (SEQ ID NO: 1301) |
| | | FLJ42844, | acetyl)-6-sulfate | | GTGAACCCCAAATATCTGAGACCAG (SEQ ID NO: 1302) |
| | | FLJ98217, | sulfatase (Morquio | | GAGACCAGTCTCAGTTTATTTTGCC (SEQ ID NO: 1303) |
| | | GALNAC6S, | syndrome, | | TAAGGATGCACCTGTGACAGCCTCA (SEQ ID NO: 1304) |
| | | GAS, MPS4A | mucopolysaccharidosis | | TACATTGGTTCAGTCAGCCTTCCAC (SEQ ID NO: 1305) |
| | | | type IVA) | | AATACACGATTGAGTCTGGCCCAGT (SEQ ID NO: 1306) |
| | | | | | GCCCAGTGAATCCGCATTTTTATGT (SEQ ID NO: 1307) |
| | | | | | CAGAGGGATGACTTCCAGTTCCGTC (SEQ ID NO: 1308) |
| | | | | | CCGTCTGTCCTTTGTCCACAAGGAA (SEQ ID NO: 1309) |
| | | | | | GAATTTCCCTGGGCGCTAATTATGA (SEQ ID NO: 1310) |
| | | | | | GAGGCGTGTAGCTTCTTATCATTGT (SEQ ID NO: 1311) |
| 214718_at | GATAD1 | tcag7.279, | GATA zinc finger | 57798 | GCTGGGCAATGGAGTCAGATTCTCT (SEQ ID NO: 1312) |
| | | FLJ22489, | domain containing 1 | | GGAGTCAGATTCTCTTTCTTAAAAA (SEQ ID NO: 1313) |
| | | FLJ40695, | | | ACTGGATTTCCAGTTCTCTAATATT (SEQ ID NO: 1314) |
| | | ODAG, | | | GTTCTCTAATATTCTTAGTACCACA (SEQ ID NO: 1315) |
| | | RG083M05.2 | | | TTAGTACCACAAGATATGTCATAGG (SEQ ID NO: 1316) |
| | | | | | GAAATTCTTAGCTGGAAAAGTGACT (SEQ ID NO: 1317) |
| | | | | | TTTTTCTCCTGCTACCTAGTAATAA (SEQ ID NO: 1318) |
| | | | | | TCTCCTGCTACCTAGTAATAAACAA (SEQ ID NO: 1319) |
| | | | | | GTTTATTACTGGTCACTTAGAAAAT (SEQ ID NO: 1320) |
| | | | | | ACCTGAGGTCGGGAAGTGGATCGCC (SEQ ID NO: 1321) |
| | | | | | AGGTCGGGAAGTGGATCGCCTGAGG (SEQ ID NO: 1322) |
| 204867_at | GCHFR | GFRP, | GTP cyclohydrolase I | 2644 | TGGGCCCCACTATGGTGGGCGATGA (SEQ ID NO: 1323) |
| | | HsT16933, | feedback regulator | | GAACAGTCGGATCCAGAGCTGATGC (SEQ ID NO: 1324) |
| | | MGC138467, | | | ATGAATACTACGTCGATGACCCTCC (SEQ ID NO: 1325) |
| | | MGC138469, | | | TCCCCGCATAGTCCTGGACAAGCTG (SEQ ID NO: 1326) |
| | | P35 | | | CAAGCTGGAACGCAGGGGCTTCCGT (SEQ ID NO: 1327) |
| | | | | | TGCTGAGCATGACGGGGGTGGGCCA (SEQ ID NO: 1328) |
| | | | | | GCCAGACGCTGGTGTGGTGTCTGCA (SEQ ID NO: 1329) |
| | | | | | GGTGTCTGCACAAGGAGTGACCTTC (SEQ ID NO: 1330) |
| | | | | | GACCTTCTCATGCTGATTTGCAGAC (SEQ ID NO: 1331) |
| | | | | | GGCAGTGAATGGCCTTCTCTGAAAC (SEQ ID NO: 1332) |
| | | | | | TTCTCTGAAACCCTGCGTCAAGCAG (SEQ ID NO: 1333) |
| 209248_at | GHITM | DERP2; MICS1; | growth hormone | 27069 | AATTTAGTAGGTTCACTGAGTAACT (SEQ ID NO: 1334) |
| | | My021; PTD010; | inducible | | GAAGGAGTCACCTGCAGTCTTTTGT (SEQ ID NO: 1335) |
| | | TMBIM5; | transmembrane | | AATACTTAGAACTTAGCACTTGTGT (SEQ ID NO: 1336) |
| | | HSPC282; | protein | | GTTATTGATTAGTGAGGAGCCAGTA (SEQ ID NO: 1337) |
| | | FLJ26584; | | | GAAACATCTGGGTATTTGGAAACAA (SEQ ID NO: 1338) |
| | | DKFZp566C0746 | | | GTGGTCATTGTTACATTCATCTGCT (SEQ ID NO: 1339) |
| | | | | | TCATCTGCTGAACTTAACAAAACTG (SEQ ID NO: 1340) |
| | | | | | ACAGGCACAGGTGATGCATTCTCCT (SEQ ID NO: 1341) |
| | | | | | ACAGGTGATGCATTCTCCTGCTGTC (SEQ ID NO: 1342) |
| | | | | | CTCAGTGCTCTCTTTCCAATATAGA (SEQ ID NO: 1343) |
| | | | | | ATGTGGTCATGTTTGACTTGTACAG (SEQ ID NO: 1344) |
| 215243_s_at | GJB3 | CX31, DFNA2, | gap junction protein, | 2707 | CACTGCTAGCAGGGCTTCAACCAGG (SEQ ID NO: 1345) |
| | | EKV, FLJ22486, | beta 3, 31 kDa | | GGAGAGGCTTCCCTGAGGACATAAT (SEQ ID NO: 1346) |
| | | MGC102938 | | | AGGTGAGAAGTGCTCCCAAGCAGAC (SEQ ID NO: 1347) |
| | | | | | CCAAGCAGACACAACAGCAGCACAG (SEQ ID NO: 1348) |
| | | | | | AGCAGCACAGAGGTCTGGAGGCCAC (SEQ ID NO: 1349) |
| | | | | | ACACAAAAAGTGATGCTCGCCCTGG (SEQ ID NO: 1350) |
| | | | | | GGCTAGCCTCAGCAGACCTAAGGCA (SEQ ID NO: 1351) |
| | | | | | AGCAGACCTAAGGCATCTCTACTCC (SEQ ID NO: 1352) |
| | | | | | TCTGGAGATACCCAGAGGTCCCCCA (SEQ ID NO: 1353) |
| | | | | | CCAGGTCATCACTTGGCTCAGTGGA (SEQ ID NO: 1354) |
| | | | | | ACTTGGCTCAGTGGAAGCCCTCTTT (SEQ ID NO: 1355) |
| 209092_s_at | GLOD4 | C17orf25, CGI- | glyoxalase domain | 51031 | AAATCCAATCATGAGTCCAGGTAGA (SEQ ID NO: 1356) |
| | | 150, HC71 | containing 4 | | AGGTAGAGAACGCCTGCTGTAATCT (SEQ ID NO: 1357) |
| | | | | | GACTGCGCATTCTGTATATAACTGT (SEQ ID NO: 1358) |
| | | | | | TCCAGACTAGGACAGCGGCATGAAC (SEQ ID NO: 1359) |
| | | | | | ATGACTTTGGTTGGGATTGCGGATA (SEQ ID NO: 1360) |
| | | | | | GATTGCGGATAGTTAGGGTTACCTC (SEQ ID NO: 1361) |
| | | | | | GGGTTACCTCTGAATCGTGTAGCTT (SEQ ID NO: 1362) |
| | | | | | GAATCCACATTAATGCCTTGTCGTG (SEQ ID NO: 1363) |
| | | | | | CCTGACGATACGCTCTTCTATTGTC (SEQ ID NO: 1364) |
| | | | | | GCTCTTCTATTGTCTTATTCTGGCA (SEQ ID NO: 1365) |
| | | | | | TGTGCGAGCTTCTTTCTGTGTATAT (SEQ ID NO: 1366) |
| 221510_s_at | GLS | AAD20, | glutaminase | 2744 | GAAGATTTAGTTTTCATATCGTATA (SEQ ID NO: 1367) |
| | | DKFZp686O15119, | | | AATTTGTGTCACTTACTATTTTTGT (SEQ ID NO: 1368) |
| | | FLJ10358, | | | GTACTGTTATCTAAGCTACTGTGTT (SEQ ID NO: 1369) |
| | | GLS1, KIAA0838 | | | AGATACTGCGAATAGGCCCTCAAAC (SEQ ID NO: 1370) |
| | | | | | TTTGCCAGTTTTAAGGACATATTTT (SEQ ID NO: 1371) |
| | | | | | CACTATTATTGGGTTTGTTTTATGC (SEQ ID NO: 1372) |
| | | | | | ATGCCATTATTGATTCTTGATATTC (SEQ ID NO: 1373) |
| | | | | | ACAATGTAGCATATTTGATTTTCTT (SEQ ID NO: 1374) |
| | | | | | TTGTGTTGTTTAGCTTTCATTTGCT (SEQ ID NO: 1375) |
| | | | | | ATGTACCTTTATTTTCCAGTATGCC (SEQ ID NO: 1376) |
| | | | | | TTTCCAGTATGCCTACATTTTGTAT (SEQ ID NO: 1377) |
| 201180_s_at | GNAI3 | RP23-89M15.4, | guanine nucleotide | 2773 | TATCCTGCTCAAAGTACCATTATGG (SEQ ID NO: 1378) |
| | | AI158965, | binding protein (G | | TAAGATTCTAGTTCTCTCTTTTCTT (SEQ ID NO: 1379) |
| | | AW537698, | protein), alpha | | CAGCTTCTTGGATACAGACACACCC (SEQ ID NO: 1380) |
| | | Galphai3, Gnai-3 | inhibiting activity | | GAACCAGTGACTTTGCTGCTACATA (SEQ ID NO: 1381) |
| | | | polypeptide 3 | | TTGACCACTTTGATTCTTGCTTGTT (SEQ ID NO: 1382) |
| | | | | | CTTGCTTGTTTGTCTCAGTTATAGG (SEQ ID NO: 1383) |
| | | | | | TTTGTACATGGTGCCTCTTGTTTTC (SEQ ID NO: 1384) |
| | | | | | AAATGTGGTGCCAAATCCCTGTTTG (SEQ ID NO: 1385) |
| | | | | | TTGCCATCGTTTTTACTGTACCGAT (SEQ ID NO: 1386) |
| | | | | | GTAATCCTTAGCCAGTATGTTCTTT (SEQ ID NO: 1387) |
| | | | | | GAAACTGTTGCATTTTGGGACTTTT (SEQ ID NO: 1388) |
| 221958_s_at | GPR177 | EVI; MRP; WLS; | G protein-coupled | 79971 | GGCTTCACCAAGGTGTGGTTTGCCA (SEQ ID NO: 1389) |
| | | C1orf139; | receptor 177 | | TAGATTTTAACATCCTTTGCGGTCC (SEQ ID NO: 1390) |
| | | FLJ23091; | | | CGGTCCCAGTCCAAGGTAGGCTGGT (SEQ ID NO: 1391) |
| | | MGC14878; | | | CAAGGTAGGCTGGTGTCATAGTCTT (SEQ ID NO: 1392) |
| | | MGC131760 | | | TAATCCATGACCACTGTTTTTTTCC (SEQ ID NO: 1393) |
| | | | | | TTCCTATTTATATCACCAGGTAGCC (SEQ ID NO: 1394) |
| | | | | | GTCAATAGATAAGTGTCCCTGTTTT (SEQ ID NO: 1395) |
| | | | | | TGAGAAGATTTATTCCACCAGGGGT (SEQ ID NO: 1396) |
| | | | | | TCCACCAGGGGTATTTCAGCTTTGA (SEQ ID NO: 1397) |
| | | | | | GAAACCAAATCTGTGTATCTAATAC (SEQ ID NO: 1398) |
| | | | | | ATGTTTGCTAAACTACCCAAGTAAG (SEQ ID NO: 1399) |
| 209409_at | GRB10 | GRB-IR, Grb-10, | growth factor | 2887 | TGTATCTCTGCCTGTGATTTTCTTT (SEQ ID NO: 1400) |
| | | IRBP, KIAA0207, | receptor-bound | | GAAACTCCATGTAGCAACCAGGACG (SEQ ID NO: 1401) |
| | | MEG1, RSS | protein 10 | | TGTGCCTCAGCCTAGATGTTTTGTC (SEQ ID NO: 1402) |
| | | | | | TTCTCTTTTCTGCACTTAATACCTG (SEQ ID NO: 1403) |
| | | | | | TGACAGTATGACCGATCTCTGCGCC (SEQ ID NO: 1404) |
| | | | | | CGCCTTTCTGGGGGCGGGCAAGCTG (SEQ ID NO: 1405) |
| | | | | | GCTGGCGGTAGATTTGTGATGTCAC (SEQ ID NO: 1406) |
| | | | | | AACCTTTATTCCATGTGCTTTGCTT (SEQ ID NO: 1407) |
| | | | | | CTTCATTCTGTACATAGCTCTTTGG (SEQ ID NO: 1408) |
| | | | | | AGCTCTTTGGCTCGTGAACCTAATT (SEQ ID NO: 1409) |
| | | | | | AGGGACTGATGTTCTGTTTCTTGTA (SEQ ID NO: 1410) |
| 220794_at | GREM2 | PRDC; DAND3; | gremlin 2, cysteine | 64388 | CGCCCCCTATTTGTGGACTAAAGAT (SEQ ID NO: 1411) |
| | | CKTSF1B2 | knot superfamily, | | GATGAACTCTGGTGTGCATGCTATT (SEQ ID NO: 1412) |
| | | | homolog (Xenopus | | AAGGTCTCTATATTAACGCTGGTTT (SEQ ID NO: 1413) |
| | | | laevis) | | TCACATGTTTTGACTCTGGCTTGCA (SEQ ID NO: 1414) |
| | | | | | TGGCTTGCAGCACCATTCGGAGTAA (SEQ ID NO: 1415) |
| | | | | | GGAGTAAGGATGACAGCAGGCCCAG (SEQ ID NO: 1416) |
| | | | | | AGCAGGCCCAGAAGGTGTTTTACTC (SEQ ID NO: 1417) |
| | | | | | CAGCAATTCACTGTCATGCACCTAT (SEQ ID NO: 1418) |
| | | | | | TTCACTGACGTTACTAAGCATTGCA (SEQ ID NO: 1419) |
| | | | | | AAACCGTATACTACTTTCACTGCCA (SEQ ID NO: 1420) |
| | | | | | CTACTTTCACTGCCATGACACTAGG (SEQ ID NO: 1421) |
| 216308_x_at | GRHPR | RP11-397D12.2, | glyoxylate | 9380 | CAATCTGATTTCATCGTCGTGGCCT (SEQ ID NO: 1422) |
| | | GLXR, PH2 | reductase/hydroxypyruvate | | TAACACCTGCAACCGAGGGACTCTG (SEQ ID NO: 1423) |
| | | | reductase | | GACTCTGCAACAAGGACTTCTTCCA (SEQ ID NO: 1424) |
| | | | | | CAACATCAGCAGGGGCGACGTCGTA (SEQ ID NO: 1425) |
| | | | | | CCTGTACCAGGCCTTGGCCAGTGGT (SEQ ID NO: 1426) |
| | | | | | GATTCTGCCCCACATTGGCAGTGCC (SEQ ID NO: 1427) |
| | | | | | CACCATGTCCTTGTTGGCAGCTAAC (SEQ ID NO: 1428) |
| | | | | | ACAACTTGCTGGCTGGCCTGAGAGG (SEQ ID NO: 1429) |
| | | | | | ACAGTACAGGTGGAGGGCCGGGAAG (SEQ ID NO: 1430) |
| | | | | | GCAAACCGTGCCCTGGTATTGTCAG (SEQ ID NO: 1431) |
| | | | | | GACACACCCAGGCTTGATTTGGATC (SEQ ID NO: 1432) |
| 206326_at | GRP | BN, GRP-10, | gastrin-releasing | 2922 | AGAGCACAGGGGAGTCTTCTTCTGT (SEQ ID NO: 1433) |
| | | preproGRP, | peptide | | CCTTGGGCAATCAGCAGCCTTCGTG (SEQ ID NO: 1434) |
| | | proGRP | | | CAAAGTTGGTAGACTCTCTGCTCCA (SEQ ID NO: 1435) |
| | | | | | CTGCTCCAGGTTCTCAACGTGAAGG (SEQ ID NO: 1436) |
| | | | | | AACCCCCAGCTGAACCAGCAATGAT (SEQ ID NO: 1437) |
| | | | | | AGCAATGATAATGATGGCCTCTCTC (SEQ ID NO: 1438) |
| | | | | | GCAAGCATCAGTTCTACGGATCATC (SEQ ID NO: 1439) |
| | | | | | TATTCTGTATCTTTCATCCTTGACT (SEQ ID NO: 1440) |
| | | | | | CGTGATTTTCAAGCAGCATCTTCTG (SEQ ID NO: 1441) |
| | | | | | GCTTTTTTATATCTAGGCTACCTGT (SEQ ID NO: 1442) |
| | | | | | GTTGGTTAGATTCAAGGCCCCGAGC (SEQ ID NO: 1443) |
| 201520_s_at | GRSF1 | FLJ13125 | G-rich RNA | 2926 | TCTTCTCTGCATTTTGTCCACATGA (SEQ ID NO: 1444) |
| | | | sequence binding | | TGAGAGGATTACCTTTCCAAGCCAA (SEQ ID NO: 1445) |
| | | | factor 1 | | TAAACTTTTTTGCTCCACTCAAGCC (SEQ ID NO: 1446) |
| | | | | | TCAAGCCTGTTAGAATCACCATGGA (SEQ ID NO: 1447) |
| | | | | | GGAATACAGCTCCAGTGGGAAGGCC (SEQ ID NO: 1448) |
| | | | | | AGCTGATGTGCACTTTGAGACCCAT (SEQ ID NO: 1449) |
| | | | | | GAGGATGCTGTTGCAGCGATGCTCA (SEQ ID NO: 1450) |
| | | | | | GCAGCGATGCTCAAGGATCGGTCCC (SEQ ID NO: 1451) |
| | | | | | GGTCCCACGTTCATCATAGGTATAT (SEQ ID NO: 1452) |
| | | | | | AAGACTCTAGGGGCTCCAGATAATA (SEQ ID NO: 1453) |
| | | | | | TTTGCACATCTTTCTTGGACTTGGG (SEQ ID NO: 1454) |
| 205770_at | GSR | MGC78522 | glutathione reductase | 2936 | TACCAACGTCAAAGGCATCTATGCA (SEQ ID NO: 1455) |
| | | | | | GCAATAGCTGCTGGCCGAAAACTTG (SEQ ID NO: 1456) |
| | | | | | AACTTGCCCATCGACTTTTTGAATA (SEQ ID NO: 1457) |
| | | | | | CAACATCCCAACTGTGGTCTTCAGC (SEQ ID NO: 1458) |
| | | | | | TATTCAACGAGCTTTACCCCGATGT (SEQ ID NO: 1459) |
| | | | | | TTACCCCGATGTATCACGCAGTTAC (SEQ ID NO: 1460) |
| | | | | | AAATGCTGCAGGGTTTTGCTGTTGC (SEQ ID NO: 1461) |
| | | | | | TTTGACAACACAGTCGCCATTCACC (SEQ ID NO: 1462) |
| | | | | | TTCACCCTACCTCTTCAGAAGAGCT (SEQ ID NO: 1463) |
| | | | | | AAGAGCTGGTCACACTTCGTTGAGA (SEQ ID NO: 1464) |
| | | | | | GAACCAGGAGACACGTGTGGCGGGC (SEQ ID NO: 1465) |
| 215766_at | GSTA1 | GST2, GSTA1-1, | Glutathione S- | 2938 | CCCAATGCCACAAAACCACATCAGA (SEQ ID NO: 1466) |
| | | GTH1, | transferase A1 | | ACTGTGCCTGGCTACATTTAGATCT (SEQ ID NO: 1467) |
| | | MGC131939 | | | GAGCATCTTTCCTCTGTTGAGTAGT (SEQ ID NO: 1468) |
| | | | | | GTGGATTCTCTATTTTATTGGTCAT (SEQ ID NO: 1469) |
| | | | | | CAAGGCTAGTGGGCTTTCACACTCC (SEQ ID NO: 1470) |
| | | | | | CACACTCCAGACTGCTGTATTCCAG (SEQ ID NO: 1471) |
| | | | | | CTGTATTCCAGCCCAAATTACTCAA (SEQ ID NO: 1472) |
| | | | | | AGCTAATGCAATCCGCTTGCCTTAC (SEQ ID NO: 1473) |
| | | | | | CTCAGGTTGCTGTTACTCTGTTTCA (SEQ ID NO: 1474) |
| | | | | | CTCTGTTTCAGATGCAACCCTCTGT (SEQ ID NO: 1475) |
| | | | | | CCCAAGTTCTCTCATTCTTAGCTAT (SEQ ID NO: 1476) |
| 205752_s_at | GSTM5 | GSTM5-5, GTM5 | glutathione S- | 2949 | CCTAGCACTGTCCTCAAAGACCATC (SEQ ID NO: 1477) |
| | | | transferase M5 | | CTCAAAGACCATCTGTATGCCCTGC (SEQ ID NO: 1478) |
| | | | | | AGCTCCGTGTGATGCCCAGTAAAGC (SEQ ID NO: 1479) |
| | | | | | TGCCCAGTAAAGCCTGAACCATGCC (SEQ ID NO: 1480) |
| | | | | | CTGAGGCTCCCTTGAACTCAGGACT (SEQ ID NO: 1481) |
| | | | | | GGGGTGGTGATCAGGCAGGTTCATA (SEQ ID NO: 1482) |
| | | | | | CTCCTGTAGGCCGTCTAGAACTGGC (SEQ ID NO: 1483) |
| | | | | | CTCCCAGGCAGACTGCCTTCTTTCA (SEQ ID NO: 1484) |
| | | | | | TCTTTCACCCTGTCCTGATAGACTT (SEQ ID NO: 1485) |
| | | | | | AGACTTCCCTGATCTAGATATCCTT (SEQ ID NO: 1486) |
| | | | | | ATCTAGATATCCTTCGTCATGACAC (SEQ ID NO: 1487) |
| 211555_s_at | GUCY1B3 | GC-S-beta-1, | guanylate cyclase 1, | 2983 | GTTTACCAGAGCCATGCATTCACCA (SEQ ID NO: 1488) |
| | | GC-SB3, | soluble, beta 3 | | TGCATTCACCATGCACGATCCATCT (SEQ ID NO: 1489) |
| | | GUC1B3, | | | GTGTCATAGGACAGCGGATGCCTCG (SEQ ID NO: 1490) |
| | | GUCB3, | | | ACAGCGGATGCCTCGATACTGTCTT (SEQ ID NO: 1491) |
| | | GUCSB3, | | | TGGGAATACTGTCAACCTCACAAGC (SEQ ID NO: 1492) |
| | | GUCY1B1 | | | ACCTCACAAGCCGAACAGAAACCAC (SEQ ID NO: 1493) |
| | | | | | AATTCAGATCCACAATTCCACTTGG (SEQ ID NO: 1494) |
| | | | | | TCCACTTGGAGCACAGAGGCCCAGT (SEQ ID NO: 1495) |
| | | | | | ATGCAAGTTTGGTTTCTATCCAGAA (SEQ ID NO: 1496) |
| | | | | | ACAGACTAGGTTCCAGTTTTCTCCT (SEQ ID NO: 1497) |
| | | | | | CCAGGAGCAGTTCTTCCCTATGGAT (SEQ ID NO: 1498) |
| 200853_at | H2AFZ | H2A.z, H2A/z, | H2A histone family, | 3015 | ACCTCACCGCAGAGGTACTTGAACT (SEQ ID NO: 1499) |
| | | H2AZ, | member Z | | GAGGTACTTGAACTGGCAGGAAATG (SEQ ID NO: 1500) |
| | | MGC117173 | | | GAACTGGCAGGAAATGCATCAAAAG (SEQ ID NO: 1501) |
| | | | | | AGAATTGGATTCTCTCATCAAGGCT (SEQ ID NO: 1502) |
| | | | | | GGATTCTCTCATCAAGGCTACAATT (SEQ ID NO: 1503) |
| | | | | | CTCTCATCAAGGCTACAATTGCTGG (SEQ ID NO: 1504) |
| | | | | | TCAAGGCTACAATTGCTGGTGGTGG (SEQ ID NO: 1505) |
| | | | | | AGTGTTGGTGATTCCAGTGGACTGT (SEQ ID NO: 1506) |
| | | | | | GTGATTCCAGTGGACTGTATCTCTG (SEQ ID NO: 1507) |
| | | | | | ACATTTGGTTTTGTTCAGACCTTAT (SEQ ID NO: 1508) |
| | | | | | GTTTTGTTCAGACCTTATTTCCACT (SEQ ID NO: 1509) |
| 201036_s_at | HADH | HAD, HADH1, | hydroxyacyl- | 3033 | CTTGCCCTACATTTTGGGCATGACA (SEQ ID NO: 1510) |
| | | HADHSC, HHF4, | Coenzyme A | | AGATGTGTCTTTATTCAGCTCGTCG (SEQ ID NO: 1511) |
| | | M/SCHAD, | dehydrogenase | | TTCAGCTCGTCGTGAAGATGCTGCT (SEQ ID NO: 1512) |
| | | MGC8392, | | | CTGAATGGGTCAGCATATCTCTGTT (SEQ ID NO: 1513) |
| | | SCHAD | | | GCATATCTCTGTTTGCATGGTTTGC (SEQ ID NO: 1514) |
| | | | | | CATGGTTTGCAGGAGGTCGGTTTTC (SEQ ID NO: 1515) |
| | | | | | GCAGGAGGTCGGTTTTCATGGTCAT (SEQ ID NO: 1516) |
| | | | | | ATGGTCATTCAGTTCCACAGATCTG (SEQ ID NO: 1517) |
| | | | | | TGAATGATTACTGTCTGTCTGTGTC (SEQ ID NO: 1518) |
| | | | | | TTTCCATGAGAAATCACTGTTGCAA (SEQ ID NO: 1519) |
| | | | | | ATTGCCTATAAATTGACTCTACTAA (SEQ ID NO: 1520) |
| 202299_s_at | HBXIP | MGC71071, XIP | hepatitis B virus x | 10542 | TCTGACCCCACTGATATTCCTGTGG (SEQ ID NO: 1521) |
| | | | interacting protein | | ACCCCACTGATATTCCTGTGGTGTG (SEQ ID NO: 1522) |
| | | | | | GATCCAGAAACACGATGGCATCACG (SEQ ID NO: 1523) |
| | | | | | TGGCATCACGGTGGCAGTGCACAAA (SEQ ID NO: 1524) |
| | | | | | TCAGCAGCCTGTCATAGGAACTGGA (SEQ ID NO: 1525) |
| | | | | | ACTGGATCCTACCTATGTTAATTAC (SEQ ID NO: 1526) |
| | | | | | TGTTAATTACCTTATAGAACTACTA (SEQ ID NO: 1527) |
| | | | | | AAGTTCCAGTAGTTAGGCCATTCAT (SEQ ID NO: 1528) |
| | | | | | TAGTTAGGCCATTCATTTAATGTGC (SEQ ID NO: 1529) |
| | | | | | TAATGTGCATTAGGCACTTTTCTGT (SEQ ID NO: 1530) |
| | | | | | ATGTTTTGAAGCAGCAGGTCCAGGT (SEQ ID NO: 1531) |
| 208826_x_at | HINT1 | FLJ30414, | histidine triad | 3094 | CCCGCGCGGGAGAGAGGCCGAGATG (SEQ ID NO: 1532) |
| | | FLJ32340, HINT, | nucleotide binding | | GAGATTGCCAAGGCTCAGGTCGCTC (SEQ ID NO: 1533) |
| | | PKCI-1, | protein 1 | | CTGGTGGCGACACGATCTTTGGGAA (SEQ ID NO: 1534) |
| | | PRKCNH1 | | | TTTTGAGGATGACCGGTGCCTTGCT (SEQ ID NO: 1535) |
| | | | | | CCTCAAGCACCAACACATTTTCTGG (SEQ ID NO: 1536) |
| | | | | | AGAAATGTGCTGCTGATCTGGGCCT (SEQ ID NO: 1537) |
| | | | | | TGGACAGTCTGTCTATCACGTTCAT (SEQ ID NO: 1538) |
| | | | | | TCACGTTCATCTCCATGTTCTTGGA (SEQ ID NO: 1539) |
| | | | | | CAAATGCATTGGCCTCCTGGTTAAG (SEQ ID NO: 1540) |
| | | | | | GGGATAATTTTCTCTTCTTTAGGCA (SEQ ID NO: 1541) |
| | | | | | AAGTAACACACTTATTTTTGCCTGT (SEQ ID NO: 1542) |
| 216526_x_at | HLA-B /// | CDABP0067, | major | 3106 | CCATCATGGGCATCGTTGCTGGCCT (SEQ ID NO: 1543) |
| | HLA-C /// | AS, HLA-B-7301, | histocompatibility | 3107 | AGCTGTGGTCACCGCTATGATGTGT (SEQ ID NO: 1544) |
| | MICA /// | HLA-B73, HLAB, | complex, class I, B /// | 4276 | GAAGAGCTCAGGTGGTGTGTGGGAC (SEQ ID NO: 1545) |
| | MICB /// | HLAC, SPDA1 /// | major | 4277 | AGATGCAGGATTTCTTCACACCTCT (SEQ ID NO: 1546) |
| | XXbac- | XXbac- | histocompatibility | 100129668 | GTGACTTCAAGAGCCTCTGGCATCT (SEQ ID NO: 1547) |
| | BPG181B23.1 | BCX101P6.2, | complex, class I, C /// | | GCATCTCTTTCTGCAAAGGCGTCTG (SEQ ID NO: 1548) |
| | | D6S204, | MHC class I | | AAGGCGTCTGAATGTGTCTGCGTTC (SEQ ID NO: 1549) |
| | | FLJ27082, HLA- | polypeptide-related | | CGATCATCTTTCCTGTTCCAGAGAG (SEQ ID NO: 1550) |
| | | Cw, HLA-Cw12, | sequence A /// MHC | | AGAGGTGGGGCTGGATGTCTCCATC (SEQ ID NO: 1551) |
| | | HLA-JY3, HLC-C, | class I polypeptide- | | TCTCCATCTCTGTCTCAAATTCATG (SEQ ID NO: 1552) |
| | | PSORS1 /// | related sequence B | | GCACTGAGCTGCAACTTCTTACTTC (SEQ ID NO: 1553) |
| | | DAMA-345G11.2, | /// MHC class I | | |
| | | MGC111087, | polypeptide-related | | |
| | | PERB11.1 /// | sequence A | | |
| | | DAAP-210H10.1, | | | |
| | | PERB11.2 | | | |
| | | /// MICA | | | |
| 213356_x_at | HNRNPA1 | HNRPA1, | heterogeneous | 3178 | AACTACTCATGTGTATGGCGCCGAT (SEQ ID NO: 1554) |
| | /// | MGC1028350 /// | nuclear | 664709 | GGCGCCGATAAATCTCGAGGACTGT (SEQ ID NO: 1555) |
| | HNRPA1L-2 | /// /// /// /// /// /// /// | ribonucleoprotein A1 | 664721 | GGTTATTGCTAGTTTCTGTTCTGTG (SEQ ID NO: 1556) |
| | /// | /// /// /// /// /// /// | /// heterogeneous | 100128836 | TTGCACCCCATGCTGTTGATTGCTA (SEQ ID NO: 1557) |
| | HNRPA1P5 | LOC144983; | nuclear | 391670 | GTAACAGTCTGATCGTGACGCTGAA (SEQ ID NO: 1558) |
| | /// | MGC102957 | ribonucleoprotein A1 | 402112 | AGTTAGTCTACTCTTAAGCCATCTT (SEQ ID NO: 1559) |
| | LOC100128 | | pseudogene /// | 440125 | GCCATCTTGGTAAATTTCCCCAACA (SEQ ID NO: 1560) |
| | 836 /// | | heterogeneous | 642817 | GAATTCCTTCAGGGTGATGCCAGGT (SEQ ID NO: 1561) |
| | LOC391670 | | nuclear | 643033 | AAGCCATTGTCTTCGGAAACCTTGG (SEQ ID NO: 1562) |
| | /// | | ribonucleoprotein A1 | 644037 | GTGATTGTTGGCACATCCTATGCAA (SEQ ID NO: 1563) |
| | LOC402112 | | pseudogene 5 /// | 645001 | GAAGCTTGTGTATCCATTATCATGT (SEQ ID NO: 1564) |
| | /// | | similar to | 728732 | |
| | LOC440125 | | heterogeneous | 729366 | |
| | /// | | nuclear | 729423 | |
| | LOC642817 | | ribonucleoprotein A1 | 730246 | |
| | /// | | /// heterogeneous | 144983 | |
| | LOC643033 | | nuclear | | |
| | /// | | ribonucleoprotein A1- | | |
| | LOC644037 | | like /// similar to | | |
| | /// | | heterogeneous | | |
| | LOC645001 | | nuclear | | |
| | /// | | ribonucleoprotein A1 | | |
| | LOC728170 | | /// similar to | | |
| | /// | | heterogeneous | | |
| | LOC728732 | | nuclear | | |
| | /// | | ribonucleoprotein A1 | | |
| | LOC729366 | | /// similar to | | |
| | /// | | heterogeneous | | |
| | LOC729423 | | nuclear | | |
| | /// | | ribonucleoprotein A1 | | |
| | LOC730246 | | /// hypothetical | | |
| | /// RP11- | | LOC642817 /// | | |
| | 78J21.1 | | similar to | | |
| | | | Heterogeneous | | |
| | | | nuclear | | |
| | | | ribonucleoprotein A1 | | |
| | | | (Helix-destabilizing | | |
| | | | protein) (Single- | | |
| | | | strand binding | | |
| | | | protein) (hnRNP core | | |
| | | | protein A1) (HDP-1) | | |
| | | | (Topoisomerase- | | |
| | | | inhibitor suppressed) | | |
| | | | /// hypothetical | | |
| | | | LOC644037 /// | | |
| | | | similar to | | |
| | | | heterogeneous | | |
| | | | nuclear | | |
| | | | ribonucleoprotein A1 | | |
| | | | /// similar to | | |
| | | | heterogeneous | | |
| | | | nuclear | | |
| | | | ribonucleoprotein A1 | | |
| | | | /// similar to | | |
| | | | heterogeneous | | |
| | | | nuclear | | |
| | | | ribonucleoprotein A1 | | |
| | | | /// similar to | | |
| | | | heterogeneous | | |
| | | | nuclear | | |
| | | | ribonucleoprotein A1 | | |
| | | | /// similar to | | |
| | | | Heterogeneous | | |
| | | | nuclear | | |
| | | | ribonucleoprotein A1 | | |
| | | | (Helix-destabilizing | | |
| | | | protein) (Single- | | |
| | | | strand RNA-binding | | |
| | | | protein) (hnRNP core | | |
| | | | protein A1) (HDP) /// | | |
| | | | hypothetical | | |
| | | | LOC730246 /// | | |
| | | | heterogeneous | | |
| | | | nuclear | | |
| | | | ribonucleoprotein A1- | | |
| | | | like | | |
| 206289_at | HOXA4 | HOXA-4 | homeobox A4 | 3201 | CCATCTGGACCATAATAGGGACACC (SEQ ID NO: 1565) |
| | | | | | CGGTTAAGAGTCTGTGCTGGTTGCC (SEQ ID NO: 1566) |
| | | | | | GAGAACAGTTGTCCAGGATGCTGGC (SEQ ID NO: 1567) |
| | | | | | ACAACCTGCTGGCCCGAAACAAGGC (SEQ ID NO: 1568) |
| | | | | | AACAAGGCTGCCAGGTGTGGAACAG (SEQ ID NO: 1569) |
| | | | | | AACAGCCCATGCTGACTGGGGACAT (SEQ ID NO: 1570) |
| | | | | | GACTGGGGACATACACTTGCATCTT (SEQ ID NO: 1571) |
| | | | | | CCCCATTAAGGCAGCTCATCCAAGC (SEQ ID NO: 1572) |
| | | | | | GACATGTTAGTTTTTCTTACTTGCA (SEQ ID NO: 1573) |
| | | | | | CAGAGATACTGTTGTCACCTTCTGG (SEQ ID NO: 1574) |
| | | | | | GGGGAGTGCATTTAGACTTATGTGG (SEQ ID NO: 1575) |
| 204778_x_at | HOXB7 | HHO.C1, HOX2, | homeobox B7 | 3217 | CCGGCTATGGGCTCGAGCCGAGTTC (SEQ ID NO: 1576) |
| | | HOX2C, Hox-2.3 | | | GGGCGCCAAGGAGCAGAGGGACTCG (SEQ ID NO: 1577) |
| | | | | | GGACTCGGACTTGGCGGCCGAGAGT (SEQ ID NO: 1578) |
| | | | | | GGCCGAGAGTAACTTCCGGATCTAC (SEQ ID NO: 1579) |
| | | | | | TCTACCCCTGGATGCGAAGCTCAGG (SEQ ID NO: 1580) |
| | | | | | CAGGAACTGACCGCAAACGAGGCCG (SEQ ID NO: 1581) |
| | | | | | CGCTACCAGACCCTGGAGCTGGAGA (SEQ ID NO: 1582) |
| | | | | | AGAATTTCACTACAATCGCTACCTG (SEQ ID NO: 1583) |
| | | | | | ACGCTCTGCCTCACGGAAAGACAGA (SEQ ID NO: 1584) |
| | | | | | ACCACCGGCCAAGACAGGGCTGAAG (SEQ ID NO: 1585) |
| | | | | | GCCCAGCTCTGGGAACTGAATCAGG (SEQ ID NO: 1586) |
| 205580_s_at | HRH1 | H1-R, hisH1 | histamine receptor | 3269 | TTAGGTGATAGCCAATCCTTCTCTC (SEQ ID NO: 1587) |
| | | H1 | | | TCGAACGGACTCAGATACCACCACA (SEQ ID NO: 1588) |
| | | | | | GAGGAGTGGGTCTAACACAGGCCTG (SEQ ID NO: 1589) |
| | | | | | TTTACTTGGAAGAGGCTCCGCTCGC (SEQ ID NO: 1590) |
| | | | | | CTCCGCTCGCATTCAAGACAGTATG (SEQ ID NO: 1591) |
| | | | | | GGTTTTATCATGGCAGCCTTCATCC (SEQ ID NO: 1592) |
| | | | | | GGTCATTGCCTTCTGCAAGAACTGT (SEQ ID NO: 1593) |
| | | | | | CATCTACCCCTTGTGCAATGAGAAC (SEQ ID NO: 1594) |
| | | | | | GAGAATTCTGCATATTCGCTCCTAA (SEQ ID NO: 1595) |
| | | | | | CCAGGCAGGCACCTGGGCTTTCTGG (SEQ ID NO: 1596) |
| | | | | | GAATCCAAACCACAGTCTTAGGGGC (SEQ ID NO: 1597) |
| 208744_x_at | HSPH1 | RP11-173P16.1, | heat shock | 10808 | GAAGGGGGCCTTTTGAGCTAGAAGC (SEQ ID NO: 1598) |
| | | DKFZp686M05240, | 105 kDa/110 kDa | | TAGAAGCTTTCTATTCTGATCCCCA (SEQ ID NO: 1599) |
| | | HSP105, | protein 1 | | GATCCCCAAGGAGTTCCATATCCAG (SEQ ID NO: 1600) |
| | | HSP105A, | | | AATAGGCCGCTTTGTAGTTCAGAAT (SEQ ID NO: 1601) |
| | | HSP105B, | | | GTCAACACCCATGGCATTTTCACCA (SEQ ID NO: 1602) |
| | | KIAA0201, NY- | | | GTGAAGCTGGAACACAGCCCCAGGT (SEQ ID NO: 1603) |
| | | CO-25 | | | AGCCCCAGGTACAAACTGATGCTCA (SEQ ID NO: 1604) |
| | | | | | TGATGCTCAACAAACCTCACAGTCT (SEQ ID NO: 1605) |
| | | | | | CCCTTCACCTGAACTTACCTCAGAA (SEQ ID NO: 1606) |
| | | | | | AAAGTTGACCAGCCTCCAGAAGCTA (SEQ ID NO: 1607) |
| | | | | | GAGCTGCCTATTGAAGCCAACTTGG (SEQ ID NO: 1608) |
| 216615_s_at | HTR3A | 5-HT-3, 5-HT3A, | 5-hydroxytryptamine | 3359 | CCCCTCAGGACCCAGGGAATGCCAG (SEQ ID NO: 1609) |
| | | 5-HT3R, 5HT3R, | (serotonin) receptor | | GCCAGGGACATTTTCAAGACACAGA (SEQ ID NO: 1610) |
| | | HTR3 | 3A | | CCCTGTTTCCAATGCCAATTCATCT (SEQ ID NO: 1611) |
| | | | | | ATGCCAATTCATCTCAGCAATCACA (SEQ ID NO: 1612) |
| | | | | | CACAAGCCAAGGTCTGAACCCTTCC (SEQ ID NO: 1613) |
| | | | | | TGGGTGTTCAAGGCCCTTACACCCT (SEQ ID NO: 1614) |
| | | | | | CCAGCAGCTCACCATGGCTTTAAAA (SEQ ID NO: 1615) |
| | | | | | GGCTTTAAAACATGCTCTCTTAGAT (SEQ ID NO: 1616) |
| | | | | | TCAGGAGAAACTCGGGCACTCCCTA (SEQ ID NO: 1617) |
| | | | | | ACTCCCTAAGTCCACTCTAGTTGTG (SEQ ID NO: 1618) |
| | | | | | TAGTTGTGGACTTTTCCCCATTGAC (SEQ ID NO: 1619) |
| 217756_x_at | HYPK /// | /// 4F5REL, | Huntingtin interacting | 25764 | GCAACGTCCGACAGAACGAGGGGAC (SEQ ID NO: 1620) |
| | SERF2 | FAM2C, | protein K /// small | 10169 | GAGGGGACGTAACGGAGGCAGGTTG (SEQ ID NO: 1621) |
| | | FLJ20431, | EDRK-rich factor 2 | | CGGAGGCAGGTTGGAGCCGCTGCCG (SEQ ID NO: 1622) |
| | | FLJ37527, | | | GCTCGCCCGCCAGAAGAATATGAAA (SEQ ID NO: 1623) |
| | | FLJ38557, | | | AAGCGCCGAGATGACGGGCTTTCTG (SEQ ID NO: 1624) |
| | | H4F5rel, | | | CCGCCCGCAAGCAGAGGGACTCGGA (SEQ ID NO: 1625) |
| | | HsT17089, | | | GGGACTCGGAGATCATGCAGCAGAA (SEQ ID NO: 1626) |
| | | MGC48826 | | | GGAACCCAAGTAGCTTTGTGGCTTC (SEQ ID NO: 1627) |
| | | | | | TCCTCCTGTAGTGCTCACAGGTCCC (SEQ ID NO: 1628) |
| | | | | | CTTCCCAGTGTTTTTTATTCCTGTG (SEQ ID NO: 1629) |
| | | | | | TTATTCCTGTGGGGCTCACCCCAAA (SEQ ID NO: 1630) |
| 215485_s_at | ICAM1 | BB2, CD54, | intercellular adhesion | 3383 | ACAGTGAAGTGTGAGGCCCACCCTA (SEQ ID NO: 1631) |
| | | P3.58 | molecule 1 (CD54), | | GCCCACCCTAGAGCCAAGGTGACGC (SEQ ID NO: 1632) |
| | | | human rhinovirus | | GTGACGCTGAATGGGGTTCCAGCCC (SEQ ID NO: 1633) |
| | | | receptor | | TATACACAAGAACCAGACCCGGGAG (SEQ ID NO: 1634) |
| | | | | | GTCCGGGAAACTGGACGTGGCCAGA (SEQ ID NO: 1635) |
| | | | | | CATTGCCCGAGCTCAAGTGTCTAAA (SEQ ID NO: 1636) |
| | | | | | TAAAGGATGGCACTTTCCCACTGCC (SEQ ID NO: 1637) |
| | | | | | AGTGACTGTCACTCGAGATCTTGAG (SEQ ID NO: 1638) |
| | | | | | CGAGATCTTGAGGGCACCTACCTCT (SEQ ID NO: 1639) |
| | | | | | GAGCACTCAAGGGGAGGTCACCCGC (SEQ ID NO: 1640) |
| | | | | | CCCCCCGGTATGAGATTGTCATCAT (SEQ ID NO: 1641) |
| 203327_at | IDE | RP11-366I13.1, | insulin-degrading | 3416 | TCATCACTTCCTTCTGGTTTTATGT (SEQ ID NO: 1642) |
| | | FLJ35968, | enzyme | | TTCCGATCCACCACTGTACTAGTAA (SEQ ID NO: 1643) |
| | | INSULYSIN | | | GTCTTCCATGAACCTGCAATTGTTT (SEQ ID NO: 1644) |
| | | | | | TATGCGTCAGCATTTTCCAATTTCC (SEQ ID NO: 1645) |
| | | | | | AGGTTGGATCTAGAGCTGCTGTTGA (SEQ ID NO: 1646) |
| | | | | | GCTGCTGTTGATCACTCAGGCATAC (SEQ ID NO: 1647) |
| | | | | | GTCCAAGCTGCAGTCCATGAGCAAT (SEQ ID NO: 1648) |
| | | | | | CATGAGCAATAACAGACTACCCCAG (SEQ ID NO: 1649) |
| | | | | | GACTACCCCAGATACTGCAGTTTAC (SEQ ID NO: 1650) |
| | | | | | GAAAGTCTTCTTTTTTGACCAGTTG (SEQ ID NO: 1651) |
| | | | | | GAGGGAGCATGTGACACAGCCAGTA (SEQ ID NO: 1652) |
| 204703_at | IFT88 | AW552028, | intraflagellar transport | 8100 | AATGTCTGCGTTTCTTAGTTCGTCT (SEQ ID NO: 1653) |
| | | Tg737, | 88 homolog | | AGTTCGTCTCTGCACAGATCTTGGA (SEQ ID NO: 1654) |
| | | Tg737Rpw, | (Chlamydomonas) | | GGGAACAGCGCATAAAGTCAGGCAG (SEQ ID NO: 1655) |
| | | TgN737Rpw, | | | GGGCTCCCGTGGCAAAAGAGAAGGA (SEQ ID NO: 1656) |
| | | Ttc10, flexo, fxo, | | | GTGCTAGCGGTGATAGTGGCCAGAA (SEQ ID NO: 1657) |
| | | orpk, polaris | | | GGTGAACGACTAAGTGCCAGACTCA (SEQ ID NO: 1658) |
| | | | | | AAGTGCCAGACTCAGAGCTTTACCT (SEQ ID NO: 1659) |
| | | | | | AAATAGATGCCTCCTATGTGGACCC (SEQ ID NO: 1660) |
| | | | | | CCCACTTGGCCCTCAAATAGAACGA (SEQ ID NO: 1661) |
| | | | | | GAAATTGCCTTATGAGATCATCCTC (SEQ ID NO: 1662) |
| | | | | | AGATCATCCTCATGTTAAACCTTGG (SEQ ID NO: 1663) |
| 207375_s_at | IL15RA | RP11-536K7.2, | interleukin 15 | 3601 | TGCGCGAGGGAGCAGGTTCTCCGCA (SEQ ID NO: 1664) |
| | | MGC104179 | receptor, alpha | | CCCAGCTTCCCAGGAGAGACCAAAG (SEQ ID NO: 1665) |
| | | | | | GAGACCAAAGGCTTCTGAGCAGGAT (SEQ ID NO: 1666) |
| | | | | | GTGAGCTGCCTGGAATACATGTGGT (SEQ ID NO: 1667) |
| | | | | | CATACCCAAAGCTCTCTGTCAATTA (SEQ ID NO: 1668) |
| | | | | | GCTTCTCCTGGCGTGGGAGACGTCT (SEQ ID NO: 1669) |
| | | | | | AGACACCAGCGTTTGGGCTTCTAAC (SEQ ID NO: 1670) |
| | | | | | GCTGCTCTGCACACATGGACAGGGA (SEQ ID NO: 1671) |
| | | | | | GAGATGCTGAGCCCAGCGAATCCTC (SEQ ID NO: 1672) |
| | | | | | CCAGCGAATCCTCTCCATTGAAGGA (SEQ ID NO: 1673) |
| | | | | | ACTCAACTCAGTGCCATTTTACGAA (SEQ ID NO: 1674) |
| 207526_s_at | IL1RL1 | DER4, FIT-1, | interleukin 1 receptor- | 9173 | GTGTTTCTGAGACTTTGATCACCTG (SEQ ID NO: 1675) |
| | | MGC32623, ST2, | like 1 | | TGATCACCTGAACTTTCTCTAGCAA (SEQ ID NO: 1676) |
| | | ST2L, ST2V, T1 | | | GGAGTGTGGTTCCAAGAGATCCATC (SEQ ID NO: 1677) |
| | | | | | GCCTGTGCCATAAAATGTGCTTCTC (SEQ ID NO: 1678) |
| | | | | | TCTTCGGGATGTTGTTTGCTGTCTG (SEQ ID NO: 1679) |
| | | | | | GATCTTTGTAGACTGTTCCTGTTTG (SEQ ID NO: 1680) |
| | | | | | AGACTGTTCCTGTTTGCTGGGAGCT (SEQ ID NO: 1681) |
| | | | | | CTCTGCTGCTTAAATTGTTCGTCCT (SEQ ID NO: 1682) |
| | | | | | CCTCCTATCGTTGGTTTGTCTAGAA (SEQ ID NO: 1683) |
| | | | | | GTCTAGAACACTCAGCTGCTTCTTT (SEQ ID NO: 1684) |
| | | | | | CTAACTTTATGAACTCCCTCTGTGT (SEQ ID NO: 1685) |
| 200955_at | IMMT | DKFZp779P1653, | inner membrane | 10989 | AGAGCTCTGCCCTGAGGATATAAAC (SEQ ID NO: 1686) |
| | | HMP, | protein, mitochondrial | | ATTACTGTCATATGCTTCCTATTGC (SEQ ID NO: 1687) |
| | | MGC111146, | (mitofilin) | | GGGGGAATCCAGACGAGTGGCACAG (SEQ ID NO: 1688) |
| | | P87, P87/89, | | | GAAGCCCGAATGACCCTAGAAACGA (SEQ ID NO: 1689) |
| | | P89, PIG4, | | | AATCCTGACAGCATATGCCAGCGCC (SEQ ID NO: 1690) |
| | | PIG52 | | | GCCAGCGCCGTAGGAATAGGAACCA (SEQ ID NO: 1691) |
| | | | | | ATAGGAACCACTCAGGTGCAGCCAG (SEQ ID NO: 1692) |
| | | | | | GCAGCGAGAGTCCCGGACTTGTCTA (SEQ ID NO: 1693) |
| | | | | | TATTCTTTCCATTTGCTATCATGTC (SEQ ID NO: 1694) |
| | | | | | GAACGCCAGGAGTGCTTTCTTTGCA (SEQ ID NO: 1695) |
| | | | | | GATCTCTACTACTGTTGATTTTGCC (SEQ ID NO: 1696) |
| 33304_at | ISG20 | CD25, HEM45 | interferon stimulated | 3669 | GTTCATCCGGCCTGAGGGAGAGATC (SEQ ID NO: 1697) |
| | | | exonuclease gene | | TCATCCGGCCTGAGGGAGAGATCAC (SEQ ID NO: 1698) |
| | | | 20 kDa | | CCGGCCTGAGGGAGAGATCACCGAT (SEQ ID NO: 1699) |
| | | | | | CCAGGCTAGAGATCCTGCAGCTCCT (SEQ ID NO: 1700) |
| | | | | | TAGAGATCCTGCAGCTCCTGAAAGG (SEQ ID NO: 1701) |
| | | | | | TGGTGGGTCATGACCTGAAGCACGA (SEQ ID NO: 1702) |
| | | | | | ACATGAGCGGCTACACAATCTACGA (SEQ ID NO: 1703) |
| | | | | | CATGAGCGGCTACACAATCTACGAC (SEQ ID NO: 1704) |
| | | | | | AAGCTGGACCACTGCAGGCGTGTCT (SEQ ID NO: 1705) |
| | | | | | AGAGCATCCAGAACAGCCTGCTTGG (SEQ ID NO: 1706) |
| | | | | | CCCGCCTGGCTGTGTCAGACTGAAG (SEQ ID NO: 1707) |
| | | | | | CCGCCTGGCTGTGTCAGACTGAAGC (SEQ ID NO: 1708) |
| | | | | | GGCTGTGTCAGACTGAAGCCCCATC (SEQ ID NO: 1709) |
| | | | | | GAGGCTTTCGGCTTTTTGGGACAGC (SEQ ID NO: 1710) |
| | | | | | GGCTTTTTGGGACAGCAACTACCTT (SEQ ID NO: 1711) |
| | | | | | GGACAGCAACTACCTTGCTTTTGGA (SEQ ID NO: 1712) |
| 205055_at | ITGAE | CD103, | integrin, alpha E | 3682 | AGAGATCTCCTGGGATCACTCTGAG (SEQ ID NO: 1713) |
| | | HUMINAE, | (antigen CD103, | | TCACTGTCGTCTTCCTGAAAGATGA (SEQ ID NO: 1714) |
| | | MGC141996 | human mucosal | | TACCATTCTTTGCCTATCATCATTA (SEQ ID NO: 1715) |
| | | | lymphocyte antigen | | AAGGCAGCGTTGGTGGACTTCTGGT (SEQ ID NO: 1716) |
| | | | 1; alpha polypeptide) | | GGACTTCTGGTGTTGATCGTGATTC (SEQ ID NO: 1717) |
| | | | | | TGATCGTGATTCTGGTCATCCTGTT (SEQ ID NO: 1718) |
| | | | | | GTCATCCTGTTCAAGTGTGGCTTTT (SEQ ID NO: 1719) |
| | | | | | CTGGGAGAGGCTATCAGCCAGTCCT (SEQ ID NO: 1720) |
| | | | | | CTTTGCATTACTTTTTCCTTCAGGA (SEQ ID NO: 1721) |
| | | | | | TAGTTTTTAACCATACATTGTCCCA (SEQ ID NO: 1722) |
| | | | | | CATTGTCCCAAAAGTGTCTGTGCAT (SEQ ID NO: 1723) |
| 204487_s_at | KCNQ1 | GAIP, RGSGAIP | potassium voltage- | 3784 | GCCCAGGAGCCCATTTGGAGGGCCT (SEQ ID NO: 1724) |
| | | | gated channel, KQT- | | AGACTGTGGAGACTGCTCCTGAGCC (SEQ ID NO: 1725) |
| | | | like subfamily, | | CATTTCCCCAGGGCACGTGGTTGAG (SEQ ID NO: 1726) |
| | | | member 1 | | GCACGTGGTTGAGTGGGGGGAACGC (SEQ ID NO: 1727) |
| | | | | | ACTTCCCTGGGTTAGACTGCCAGCT (SEQ ID NO: 1728) |
| | | | | | GCCAGCTGCTGAGCCGCAGAGAAGT (SEQ ID NO: 1729) |
| | | | | | GCCGCAGAGAAGTGACGGTTCCTAC (SEQ ID NO: 1730) |
| | | | | | GACGGTTCCTACACAGGACAGGGGT (SEQ ID NO: 1731) |
| | | | | | TTCCTTCTGGGCATTACATCGCATA (SEQ ID NO: 1732) |
| | | | | | GGGCATTACATCGCATAGAAATCAA (SEQ ID NO: 1733) |
| | | | | | TAATTTGTGGTGATTTGGATCTGTG (SEQ ID NO: 1734) |
| 212357_at | KIAA0280 | KIAA0280, | KIAA0280 | 23201 | GATAGCAGGGGGATTTTCCTTCCTA (SEQ ID NO: 1735) |
| | | TCRP1 | | | GCAAAGTACCGGCCCATAGGAATCA (SEQ ID NO: 1736) |
| | | | | | CCTTTCTCCTCAGGCCTAAGAGAGT (SEQ ID NO: 1737) |
| | | | | | AGAGAGGAGACTGTCCCAGAGACCT (SEQ ID NO: 1738) |
| | | | | | TCCTCGGGTCAGCCAGATAGTCTGG (SEQ ID NO: 1739) |
| | | | | | GGGGTAAGGCCAGGCCTCTAGCTAC (SEQ ID NO: 1740) |
| | | | | | GGCCTCTAGCTACTTGGAGTTGTCT (SEQ ID NO: 1741) |
| | | | | | TCCCTGTTTCATATCACATGACAGA (SEQ ID NO: 1742) |
| | | | | | GACAGAGAAACCTGTTCTCATGGCA (SEQ ID NO: 1743) |
| | | | | | TCTCATGGCATGTAACATCCCTGTG (SEQ ID NO: 1744) |
| | | | | | CATCCCTGTGAAGAGAGCGTTGTAT (SEQ ID NO: 1745) |
| 212311_at | KIAA0746 /// | DKFZp781J1697, | KIAA0746 protein /// | 23231 | GGAAGGTACGATAATCCCACACCAT (SEQ ID NO: 1746) |
| | SERINC2 | FLJ21629, | serine incorporator 2 | 347735 | TCCCACACCATATCTTGGATTTCTT (SEQ ID NO: 1747) |
| | | FLJ41299 /// | | | TTGACTCAACTCTCCATTCTAATAA (SEQ ID NO: 1748) |
| | | TDE2; TDE2L; | | | GAGCCACAGTAACGAGGAGTCCTTC (SEQ ID NO: 1749) |
| | | FKSG84; | | | CTCAGCCCTGATCTACTTTCTGGGA (SEQ ID NO: 1750) |
| | | PRO0899; | | | TTTCTGGGAACCTTTCTGCTATCCA (SEQ ID NO: 1751) |
| | | MGC90340 | | | GCAGTATTTCCAGTCTGTCTCAGCA (SEQ ID NO: 1752) |
| | | | | | TGCAGATGCCTCTGACCAAGACCAG (SEQ ID NO: 1753) |
| | | | | | AAGACCAGCCCACAGTAACTAATAA (SEQ ID NO: 1754) |
| | | | | | GTAACTAATAACCCGGAGCCACGTG (SEQ ID NO: 1755) |
| | | | | | CACGTGGGTGAACTGTGCACTCCAG (SEQ ID NO: 1756) |
| 212314_at | KIAA0746 /// | DKFZp781J1697, | KIAA0746 protein /// | 23231 | TATTTTGGTACCTGTGCTTGCCACA (SEQ ID NO: 1757) |
| | SERINC2 | FLJ21629, | serine incorporator 2 | 347735 | TTGATAGATTTCTCTTTGACTTCCA (SEQ ID NO: 1758) |
| | | FLJ41299 /// | | | TTGACTTCCAAGACCTAGCAGTTAT (SEQ ID NO: 1759) |
| | | TDE2; TDE2L; | | | GTCCTAGTGCTTCCGAATCATTTAA (SEQ ID NO: 1760) |
| | | FKSG84; | | | AATGGCATTGTCGGATATCTTTTAC (SEQ ID NO: 1761) |
| | | PRO0899; | | | ATCTTTTACATTTCAATTGCAATCC (SEQ ID NO: 1762) |
| | | MGC90340 | | | AGTACTTAACTGTAGTCTTCTCCAT (SEQ ID NO: 1763) |
| | | | | | GTAGTCTTCTCCATGAATTACACGT (SEQ ID NO: 1764) |
| | | | | | GCCTCTAGCTTATAGTTTCATCCCT (SEQ ID NO: 1765) |
| | | | | | GCCTGCGTGAGTCTGTACAGGGATA (SEQ ID NO: 1766) |
| | | | | | GGTCCAAACTACTCTTTGCACTACT (SEQ ID NO: 1767) |
| 202962_at | KIF13B | GAKIN, | kinesin family | 23303 | ATGTTTCTGGGCCTACCAAGGTTCA (SEQ ID NO: 1768) |
| | | KIAA0639 | member 13B | | CTGGGAATGTGACTGCTGGAGCCTG (SEQ ID NO: 1769) |
| | | | | | TGAGAGTGTGTGTTGGTGGCTGTGC (SEQ ID NO: 1770) |
| | | | | | ACAAGACGGGAGTCACCCTGTGCTT (SEQ ID NO: 1771) |
| | | | | | CCAAGATACTGACCCATTGAACCCC (SEQ ID NO: 1772) |
| | | | | | TTCTCTCCACAAAGTCCGTGGTGCC (SEQ ID NO: 1773) |
| | | | | | GGTGGGCTGCAGACACTAATGGTGT (SEQ ID NO: 1774) |
| | | | | | GGTCTTGGAACAGCTTCTCTATGTG (SEQ ID NO: 1775) |
| | | | | | GCTTCTCTATGTGTGGATTCGTGTA (SEQ ID NO: 1776) |
| | | | | | AACCACCTGTAATTTTGTACCATAT (SEQ ID NO: 1777) |
| | | | | | GTACCATATGTGTCTTTCCATCAAA (SEQ ID NO: 1778) |
| 213656_s_at | KLC1 | KLC, KNS2, | kinesin light chain 1 | 3831 | CAGCAGCAGTGGCCTGGAAGACGCC (SEQ ID NO: 1779) |
| | | KNS2A, | | | GCAGTGGCCTGGAAGACGCCACCGC (SEQ ID NO: 1780) |
| | | MGC15245 | | | TTCTCCTGCGTCTGTGTGCATAGGA (SEQ ID NO: 1781) |
| | | | | | CCTGCGTCTGTGTGCATAGGACATG (SEQ ID NO: 1782) |
| | | | | | GTCTGTGTGCATAGGACATGATACT (SEQ ID NO: 1783) |
| | | | | | GACATGATACTAATAACCACACGGC (SEQ ID NO: 1784) |
| | | | | | AATAACCACACGGCTGGCGTGACCT (SEQ ID NO: 1785) |
| | | | | | CCATGTGTAACTTCCTCACGTTGTG (SEQ ID NO: 1786) |
| | | | | | TGTAACTTCCTCACGTTGTGTGCGA (SEQ ID NO: 1787) |
| | | | | | ACTTCCTCACGTTGTGTGCGATAAC (SEQ ID NO: 1788) |
| | | | | | GTGTGCGATAACGTATTTTATTGTA (SEQ ID NO: 1789) |
| 206966_s_at | KLF12 | AP-2rep, | Kruppel-like factor 12 | 11278 | CCGCCTTCAAGTCCCATGAATTTAC (SEQ ID NO: 1790) |
| | | AP2REP, | | | CAAACTGAGTCATGTTCACCGCATC (SEQ ID NO: 1791) |
| | | HSPC122 | | | CATCCCCGTGGTGGTACAGTCGGTG (SEQ ID NO: 1792) |
| | | | | | TGGTACAGTCGGTGCCTGTTGTCTA (SEQ ID NO: 1793) |
| | | | | | GTCTACACAGCTGTAAGGTCACCTG (SEQ ID NO: 1794) |
| | | | | | GAACAACACTATTGTCGTGCCGCTT (SEQ ID NO: 1795) |
| | | | | | GTCGTGCCGCTTTTGGAGGATGGGA (SEQ ID NO: 1796) |
| | | | | | TGGCAAAGCACAAATGGACCCCCGA (SEQ ID NO: 1797) |
| | | | | | AGGCCTATCTCCCAGACAAAGTAAA (SEQ ID NO: 1798) |
| | | | | | AAATGTGACCTTAGATAGCGTTAAT (SEQ ID NO: 1799) |
| | | | | | CCCTTTCCATAGCCAGAGCAGTACA (SEQ ID NO: 1800) |
| 205569_at | LAMP3 | CD208, DC- | lysosomal-associated | 27074 | AGCCTATCCTTAATAAATCCTCCAC (SEQ ID NO: 1801) |
| | | LAMP, DCLAMP, | membrane protein 3 | | AATCCTCCACTCTCTGGAAGGAGAC (SEQ ID NO: 1802) |
| | | LAMP, TSC403 | | | GAAACTTCGCTAACCAACTGTTCTT (SEQ ID NO: 1803) |
| | | | | | GTTCTTTCTTGAGTGTATAGCCCCA (SEQ ID NO: 1804) |
| | | | | | ATAGCCCCATCTTGTGGTAACTTGC (SEQ ID NO: 1805) |
| | | | | | GCTTCTGCACTTCATATCCATATTT (SEQ ID NO: 1806) |
| | | | | | ATCCATATTTCCTATTGTTCACTTT (SEQ ID NO: 1807) |
| | | | | | TTTATTCTGTAGAGCAGCCTGCCAA (SEQ ID NO: 1808) |
| | | | | | AAAGTCCACATAACCCTAGAATTCT (SEQ ID NO: 1809) |
| | | | | | GCCTAGAGACCATGTTGACTTTCCT (SEQ ID NO: 1810) |
| | | | | | GGCAAGGTCCTGACTTTAGTCTTAA (SEQ ID NO: 1811) |
| 202019_s_at | LANCL1 | GPR69A, p40 | LanC lantibiotic | 10314 | TCTACAACCTCACACAGGACATGAA (SEQ ID NO: 1812) |
| | | | synthetase | | GAAGTACCTGTATAGGGCCTGTAAG (SEQ ID NO: 1813) |
| | | | component C-like 1 | | GGGCCTGTAAGTTTGCTGAATGGTG (SEQ ID NO: 1814) |
| | | | (bacterial) | | TTCTCTCTCTTTGAAGGAATGGCTG (SEQ ID NO: 1815) |
| | | | | | CAATATATTTCCTGGCTGACCTGCT (SEQ ID NO: 1816) |
| | | | | | CCTGCTAGTCCCCACAAAAGCCAGG (SEQ ID NO: 1817) |
| | | | | | AGCCAGGTTCCCTGCATTTGAACTC (SEQ ID NO: 1818) |
| | | | | | AAAGGATAGCATGCCACCTGCAACT (SEQ ID NO: 1819) |
| | | | | | CTGCATGACCCTTTCTGTATATTCA (SEQ ID NO: 1820) |
| | | | | | AACCCAAGCTAAGTGCTTCCGTTGC (SEQ ID NO: 1821) |
| | | | | | GTGCTTCCGTTGCTTTCCAAGGAAA (SEQ ID NO: 1822) |
| 217933_s_at | LAP3 | LAP, LAPEP, | leucine | 51056 | ATGTACAGCTGCAGCATTCCTGAAA (SEQ ID NO: 1823) |
| | | PEPS | aminopeptidase 3 | | GTAACTCATCCTAAGTGGGCACATT (SEQ ID NO: 1824) |
| | | | | | TGGGCACATTTAGACATAGCAGGCG (SEQ ID NO: 1825) |
| | | | | | GCAGGCGTGATGACCAACAAAGATG (SEQ ID NO: 1826) |
| | | | | | GAAGTTCCCTATCTACGGAAAGGCA (SEQ ID NO: 1827) |
| | | | | | GAAAGGCATGACTGGGAGGCCCACA (SEQ ID NO: 1828) |
| | | | | | GGCCCACAAGGACTCTCATTGAGTT (SEQ ID NO: 1829) |
| | | | | | GAGTTCTTACTTCGTTTCAGTCAAG (SEQ ID NO: 1830) |
| | | | | | GACAATGCTTAGTTCAGATACTCAA (SEQ ID NO: 1831) |
| | | | | | AGAACTTCCTAATCACTTTTCAGAG (SEQ ID NO: 1832) |
| | | | | | GAAAATTACTATGCACTTGTCAGAA (SEQ ID NO: 1833) |
| 218717_s_at | LEPREL1 | FLJ10718, | leprecan-like 1 | 55214 | GAAACTACAACTCTCACGTGTGCTC (SEQ ID NO: 1834) |
| | | MLAT4, P3H2 | | | TAGGTGCTAACGGCCATGAGCTCCG (SEQ ID NO: 1835) |
| | | | | | GCTCCGACTCTCCAAAGTGAGCTCC (SEQ ID NO: 1836) |
| | | | | | CCACGCTGCCTCAGGTATCATGGGC (SEQ ID NO: 1837) |
| | | | | | TGGGCGTAATGATCACCCAGGCTCC (SEQ ID NO: 1838) |
| | | | | | CAGGCTCCGGGAGATCTCATGGATG (SEQ ID NO: 1839) |
| | | | | | GAATTTTTGGCTCTGGTGTTTTCGC (SEQ ID NO: 1840) |
| | | | | | ACTGGAAGCTTTGATTCACCCTCCA (SEQ ID NO: 1841) |
| | | | | | TAGTAGAATGGCTTTTCACCCTGGT (SEQ ID NO: 1842) |
| | | | | | GAAACTCTTGAATACTGCCTGCATC (SEQ ID NO: 1843) |
| | | | | | CACCATGGCCAGGTTGCCTAGGAGT (SEQ ID NO: 1844) |
| 203236_s_at | LGALS9 | HUAT, | lectin, galactoside- | 3965 | ATCCAGCTGACCCATGTGCAGACAT (SEQ ID NO: 1845) |
| | | LGALS9A, | binding, soluble, 9 | | ATGTGCAGACATAGGCGGCTTCCTG (SEQ ID NO: 1846) |
| | | MGC117375, | (galectin 9) | | GGATCTGGGCTTTAATGCAGAGGCC (SEQ ID NO: 1847) |
| | | MGC125973, | | | TTTAATGCAGAGGCCATGTCCTTGT (SEQ ID NO: 1848) |
| | | MGC125974 | | | GCCACCCTGGAACGGAGAAGGCAGC (SEQ ID NO: 1849) |
| | | | | | AGGCAGCTGACGGGGATTGCCTTCC (SEQ ID NO: 1850) |
| | | | | | CCCAGGAGGCAGGCACAGCCAGGGA (SEQ ID NO: 1851) |
| | | | | | GGAGAGGGGAGGAGTGGGCAGTGAA (SEQ ID NO: 1852) |
| | | | | | CCCCTCCTGGAAAGCAGGCCTGATG (SEQ ID NO: 1853) |
| | | | | | TGGAAAGCAGGCCTGATGGCTTCCC (SEQ ID NO: 1854) |
| | | | | | CCACCTGACCAGAGTGTTCTCTTCA (SEQ ID NO: 1855) |
| 218272_at | LL22NC03- | LL22NC03- | hypothetical protein | 55020 | TACAGATCAGCGCGCACATGGGGTC (SEQ ID NO: 1856) |
| | 5H6.5 | 5H6.5, FLJ20699 | FLJ20699 | | TGTCTCTGGGGCGAGTCTTGGAGCC (SEQ ID NO: 1857) |
| | | | | | CTGTTGGTGCTGATTTGGACCCGTT (SEQ ID NO: 1858) |
| | | | | | GAGCTGCTCTGTTGTGGCAAAACCC (SEQ ID NO: 1859) |
| | | | | | AAGTGCTGTGATGTGTGGCTGTGAC (SEQ ID NO: 1860) |
| | | | | | GGCTGTGACAAGCCTGGAGCGGGTC (SEQ ID NO: 1861) |
| | | | | | CACTGAACGCCTGCTGAATGTGCCG (SEQ ID NO: 1862) |
| | | | | | CTGAATGTGCCGCTGACTCAGCTGT (SEQ ID NO: 1863) |
| | | | | | GAAGCAGGCAGGCCTCTCAGAAGGG (SEQ ID NO: 1864) |
| | | | | | GAGGCCTCCAAATCTATTGAGTCCC (SEQ ID NO: 1865) |
| | | | | | TTGAGTCCCCACAGTTTGCTCAAGC (SEQ ID NO: 1866) |
| 219095_at | LOC100131005 | /// JMJD7, | similar to PLA2G4B | 100131005 | TGGGGAGGTGAACCTGTCTTCATCG (SEQ ID NO: 1867) |
| | /// | FLJ20543, | protein /// jumonji | 100137047 | TCTCCCTACCACTACACGAAGGTGA (SEQ ID NO: 1868) |
| | LOC100137047 | FLJ20656, | domain containing 7 | 8681 | GTGACCTACAGCCAGGAGGACGTGG (SEQ ID NO: 1869) |
| | /// | FLJ20807, | /// JMJD7-PLA2G4B | 100137049 | CTGCTGCACCTGACACATTACAATG (SEQ ID NO: 1870) |
| | LOC100137047- | FLJ77014, | readthrough | | GCGCCAGGCAGTGCAGCGGAGGCGG (SEQ ID NO: 1871) |
| | PLA2G4B /// | FLJ78330 /// | transcript /// | | TCCCTGGCTGCTGAGTTGCAGGTGG (SEQ ID NO: 1872) |
| | PLA2G4B | JMJD7- | phospholipase A2, | | GGAACTGTCATCACGCAGTGCTTCA (SEQ ID NO: 1873) |
| | | PLA2G4B, | group IVB (cytosolic) | | GCTTCAGAGCCTCGGGCTCAGGTGG (SEQ ID NO: 1874) |
| | | HsT16992, | | | TCCCAGGGTCCAGGCTGAGGGCTGG (SEQ ID NO: 1875) |
| | | PLA2G4B, | | | GGAGGCCAAGCCCATTTGTGTAATC (SEQ ID NO: 1876) |
| | | cPLA2-beta /// | | | CCTTCTGCGCTACCTTGAGTAGTTG (SEQ ID NO: 1877) |
| | | DKFZp686N12131, | | | |
| | | FLJ17693, | | | |
| | | FLJ42498, | | | |
| | | HsT16992, | | | |
| | | cPLA2-beta | | | |
| 201569_s_at | LOC100131861 | OMP85; SAM50; | sorting and assembly | 100131861 | GGATATGTGATGGCGTCCAGTTTGG (SEQ ID NO: 1878) |
| | /// | TOB55; TRG-3; | machinery | 25813 | GATGGCGTCCAGTTTGGAGCTGGGA (SEQ ID NO: 1879) |
| | SAMM50 | CGI-51; | component 50 | | GGCGTCCAGTTTGGAGCTGGGATAA (SEQ ID NO: 1880) |
| | | YNL026W | homolog (S. cerevisiae) | | GAGCTGGGATAAGGTTCCTGTAGCC (SEQ ID NO: 1881) |
| | | | /// | | ACACCGTCTCTCGAGGAAACGCGGT (SEQ ID NO: 1882) |
| | | | hypothetical protein | | GTCTCTCGAGGAAACGCGGTTCAGC (SEQ ID NO: 1883) |
| | | | LOC100131861 | | GAGGAAACGCGGTTCAGCGATTCTT (SEQ ID NO: 1884) |
| | | | | | GAAACGCGGTTCAGCGATTCTTTGA (SEQ ID NO: 1885) |
| | | | | | CGCGGTTCAGCGATTCTTTGACTGC (SEQ ID NO: 1886) |
| | | | | | GGTTCAGCGATTCTTTGACTGCGGA (SEQ ID NO: 1887) |
| | | | | | TTCAGCGATTCTTTGACTGCGGACC (SEQ ID NO: 1888) |
| 214133_at | LOC100133432 | /// mucin 6, | hypothetical protein | 100131861 | GACAGACAGGAAAACACCCACCAGC (SEQ ID NO: 1889) |
| | /// | gastric | LOC100131861 /// | 4588 | CTCCCTGGGGCACCGGTTGGAGAGG (SEQ ID NO: 1890) |
| | MUC6 | | mucin 6, oligomeric | | GAGGCGGACAGTGGTCACGGACCTC (SEQ ID NO: 1891) |
| | | | mucus/gel-forming | | GGCCCAGAACCCTGCAGATGAAGCC (SEQ ID NO: 1892) |
| | | | | | GACCCATCAGGGGCGAGGAGGGCAC (SEQ ID NO: 1893) |
| | | | | | GGAGGGCACGGAAACCTGTGCCGAG (SEQ ID NO: 1894) |
| | | | | | GTGCCGAGATGGGGGCAAGAGGCCC (SEQ ID NO: 1895) |
| | | | | | GAGGAGATCCCCAGAGTCAGGGAGG (SEQ ID NO: 1896) |
| | | | | | GCCTGTCCTTGGGAGAGGGCGTCAC (SEQ ID NO: 1897) |
| | | | | | TCACCCGGTCAGAGACTCCAAATAA (SEQ ID NO: 1898) |
| | | | | | GAGACTCCAAATAAACCGGTTCTTG (SEQ ID NO: 1899) |
| 220009_at | LONRF3 | RP23-145O4.1, | LON peptidase N- | 79836 | GGTTTCATTCGCTCAAATTATCCCT (SEQ ID NO: 1900) |
| | | 4932412G04Rik, | terminal domain and | | GATACTCAATCACTTTGGTCCCATG (SEQ ID NO: 1901) |
| | | 5730439E01Rik, | ring finger 3 | | AGAAAGACGCCGATCCTCAGATGAA (SEQ ID NO: 1902) |
| | | A830039N02Rik, | | | CTCAGATGAACCCGAATGGCCCAGC (SEQ ID NO: 1903) |
| | | AU023707, | | | GGTGGATGTTAGCAGTTCTTCCCTT (SEQ ID NO: 1904) |
| | | Rnf127 | | | GTTCTTCCCTTGGAAAGCCGAGCTC (SEQ ID NO: 1905) |
| | | | | | TCCCCTTCCTAGCAATGAGGTCCTT (SEQ ID NO: 1906) |
| | | | | | AATGGTATTCGACGAGTCCTGGCCT (SEQ ID NO: 1907) |
| | | | | | TGGCCTTCATATCCCGAAACCAAAA (SEQ ID NO: 1908) |
| | | | | | GTGGATTGCCGAAGAGGAGCTCCCA (SEQ ID NO: 1909) |
| | | | | | GAGGCATCAGCCTGCTGTTGATCAC (SEQ ID NO: 1910) |
| 220816_at | LPAR3 | EDG7, Edg-7, | lysophosphatidic acid | 23566 | TGGCCCCCATTTACAGCAGGAGTTA (SEQ ID NO: 1911) |
| | | FLJ98231, | receptor 3 | | GGAGTTACCTTGTTTTCTGGACAGT (SEQ ID NO: 1912) |
| | | GPCR, | | | CCTTCCTCATCATGGTTGTGGTGTA (SEQ ID NO: 1913) |
| | | HOFNH30, LP- | | | GTACCTGCGGATCTACGTGTACGTC (SEQ ID NO: 1914) |
| | | A3, LPA3, RP4- | | | GAGGAAAACCAACGTCTTGTCTCCG (SEQ ID NO: 1915) |
| | | 678I3 | | | TCTCCGCATACAAGTGGGTCCATCA (SEQ ID NO: 1916) |
| | | | | | GCCGGAGGACACCCATGAAGCTAAT (SEQ ID NO: 1917) |
| | | | | | GGGCGTTTGTGGTATGCTGGACCCC (SEQ ID NO: 1918) |
| | | | | | GAGAACCCAGAGAGGCGTCCCTCTC (SEQ ID NO: 1919) |
| | | | | | CAGGAGTGACACAGGCAGCCAGTAC (SEQ ID NO: 1920) |
| | | | | | GCACTTCCTAAACTCTGGATGCCTC (SEQ ID NO: 1921) |
| 201932_at | LRRC41 | MGC126571, | leucine rich repeat | 10489 | CTGGCTGGACCAGGATGCAGTCACA (SEQ ID NO: 1922) |
| | | MGC126573, | containing 41 | | GGCTACCTGCCATGTGGTTAGCGAC (SEQ ID NO: 1923) |
| | | MUF1, PP7759, | | | TGGTTAGCGACTCATGGACTCATCC (SEQ ID NO: 1924) |
| | | RP4-636H5.2 | | | TCCCAGGCCTTCGCAGATTATGTTA (SEQ ID NO: 1925) |
| | | | | | CGGTACCATCAGCTTGCAGGGGCTG (SEQ ID NO: 1926) |
| | | | | | TGCAGGGGCTGAAGCATGGGCTGCC (SEQ ID NO: 1927) |
| | | | | | GAGGCCCAGCAAACAGGCATTCTCA (SEQ ID NO: 1928) |
| | | | | | GGCATTCTCACAGCTGGGTTTATAG (SEQ ID NO: 1929) |
| | | | | | CTCAGTATCCTGGGAACCCTGGGCC (SEQ ID NO: 1930) |
| | | | | | ATAATTGCTGAAGAGATCCCCTCCC (SEQ ID NO: 1931) |
| | | | | | TCAAACCCTTTCATACCTTTATTCT (SEQ ID NO: 1932) |
| 212904_at | LRRC47 | KIAA1185; RP1- | leucine rich repeat | 57470 | TATGTATTCGTTGTTCTGTTTTTCC (SEQ ID NO: 1933) |
| | | 286D6.3 | containing 47 | | GATGATTCTGTCGTAAAGTGATGCT (SEQ ID NO: 1934) |
| | | | | | AAGTGATGCTATGTTGTCGTTACAA (SEQ ID NO: 1935) |
| | | | | | GTGCTGTTACGTGGCACTGTACAGT (SEQ ID NO: 1936) |
| | | | | | CAGTCATGTGCCACGTAACAGCGTC (SEQ ID NO: 1937) |
| | | | | | CACGTAACAGCGTCTGGGTCAGTGA (SEQ ID NO: 1938) |
| | | | | | GGGTCAGTGACGGACACTTACCTGA (SEQ ID NO: 1939) |
| | | | | | ACTTACCTGACAGCGGATCCACAAT (SEQ ID NO: 1940) |
| | | | | | GATCCACAATATTCTCGTGCAGTGT (SEQ ID NO: 1941) |
| | | | | | GCAGTGTGTTTGGAATCCTGGTCTG (SEQ ID NO: 1942) |
| | | | | | GTGAGTGATGTTCAGTCATGCTGCT (SEQ ID NO: 1943) |
| 211370_s_at | MAP2K5 | AI324775, | mitogen-activated | 5607 | CATTCTGATGTCTGGAGCTTAGGAA (SEQ ID NO: 1944) |
| | | AI428457, MEK5, | protein kinase kinase 5 | | CTCCAGCTTCTGCAGTGCATTGTTG (SEQ ID NO: 1945) |
| | | Mapkk5, Prkmk5 | | | TTGTTGATGAGGATTCGCCCGTCCT (SEQ ID NO: 1946) |
| | | | | | CCCGTCCTTCCAGTTGGAGAGTTCT (SEQ ID NO: 1947) |
| | | | | | GGAGAGTTCTCGGAGCCATTTGTAC (SEQ ID NO: 1948) |
| | | | | | GGAGCCATTTGTACATTTCATCACT (SEQ ID NO: 1949) |
| | | | | | ACATTTCATCACTCAGTGTATGCGA (SEQ ID NO: 1950) |
| | | | | | GCCAAAAGAAAGGCCAGCACCTGAA (SEQ ID NO: 1951) |
| | | | | | GCACCTGAAGAATTGATGGGCCACC (SEQ ID NO: 1952) |
| | | | | | AAGAATTGATGGGCCACCCGTTCAT (SEQ ID NO: 1953) |
| | | | | | ATGATGGAAATGCCGCCGTGGTGTC (SEQ ID NO: 1954) |
| 206854_s_at | MAP3K7 | TAK1, TGF1a | mitogen-activated | 6885 | GCATGCTCATTGTGTGAAGGCTAGC (SEQ ID NO: 1955) |
| | | | protein kinase kinase | | GGAGGTATCAAACTAGCTGCTATGT (SEQ ID NO: 1956) |
| | | | kinase 7 | | CTGCTATGTGCAAACAGCGTCCATT (SEQ ID NO: 1957) |
| | | | | | ACAGCGTCCATTTTTTCATATTAGA (SEQ ID NO: 1958) |
| | | | | | GGTGGAACCTCAAGAATGACTTTAT (SEQ ID NO: 1959) |
| | | | | | ATGACTTTATTCTTGTATCTCATCT (SEQ ID NO: 1960) |
| | | | | | GGGATAGTTCCGTGTAAGGGCTTTG (SEQ ID NO: 1961) |
| | | | | | GGCTTTGATGCCAGCATCCTTGGAT (SEQ ID NO: 1962) |
| | | | | | AGCATCCTTGGATCAGTACTGAACT (SEQ ID NO: 1963) |
| | | | | | TGAACTCAGTTCCATCCGTAAAATA (SEQ ID NO: 1964) |
| | | | | | GGTAAGTGGCAGCTGCTCTATTTAA (SEQ ID NO: 1965) |
| 243_g_at | MAP4 | DKFZp779A1753, | microtubule- | 4134 | TTCTTTTCTAACCAAGAGGCTGGTT (SEQ ID NO: 1966) |
| | | MGC8617 | associated protein 4 | | TTGGCATCTCTGTCCCATTCCCTGG (SEQ ID NO: 1967) |
| | | | | | AGATGGAATTCCTTCAGGCCGGCAC (SEQ ID NO: 1968) |
| | | | | | TCCAAGGGAGCCTCATGCAGATAGT (SEQ ID NO: 1969) |
| | | | | | AAGGGAGCCTCATGCAGATAGTAGG (SEQ ID NO: 1970) |
| | | | | | GAGCCTCATGCAGATAGTAGGAAAT (SEQ ID NO: 1971) |
| | | | | | CCTCATGCAGATAGTAGGAAATCAG (SEQ ID NO: 1972) |
| | | | | | GAGACTAAGGCTATCTGCTTCCCTT (SEQ ID NO: 1973) |
| | | | | | ACTAAGGCTATCTGCTTCCCTTATG (SEQ ID NO: 1974) |
| | | | | | AAGGCTATCTGCTTCCCTTATGCCC (SEQ ID NO: 1975) |
| | | | | | TCTGCTTCCCTTATGCCCTGACTGG (SEQ ID NO: 1976) |
| | | | | | AGGGCATCCCAGCTAGGCCTTGGGA (SEQ ID NO: 1977) |
| | | | | | GAGAAATCCCGGGAACTGTATTGAC (SEQ ID NO: 1978) |
| | | | | | AATCCCGGGAACTGTATTGACACAA (SEQ ID NO: 1979) |
| | | | | | ATTGACACAAAGATTCTTATTGCAC (SEQ ID NO: 1980) |
| | | | | | ACACAAAGATTCTTATTGCACTTGT (SEQ ID NO: 1981) |
| 218181_s_at | MAP4K4 | FLH21957, | mitogen-activated | 9448 | GTAACTTCTCCACAGAAGTGCCAAT (SEQ ID NO: 1982) |
| | | FLJ10410, | protein kinase kinase | | AAACAGTATTGCAATGACACCATTA (SEQ ID NO: 1983) |
| | | FLJ20373, | kinase kinase 4 | | TGTTAGAGGAGTGCTCTTCCAAACA (SEQ ID NO: 1984) |
| | | FLJ90111, HGK, | | | AGGTTTAGTCAGAGCTTTCACAAGT (SEQ ID NO: 1985) |
| | | KIAA0687, NIK | | | GAGTAACCCTTTCTGTATTGAGTGC (SEQ ID NO: 1986) |
| | | | | | GTTTTGTTACACTAATGCGCACCAC (SEQ ID NO: 1987) |
| | | | | | CACTAATGCGCACCACATATTTATG (SEQ ID NO: 1988) |
| | | | | | GGTTTTCGTCTTAGTTGTAGCACAC (SEQ ID NO: 1989) |
| | | | | | GTAGCACACTTACCCTAATTTTGCC (SEQ ID NO: 1990) |
| | | | | | GACTGGTGGCAAGTACACAGCCCTT (SEQ ID NO: 1991) |
| | | | | | CCCTTTTTTTTGCAGTGCTAACTTG (SEQ ID NO: 1992) |
| 203552_at | MAP4K5 | GCKR, KHS, | mitogen-activated | 11183 | ACACACACATGCAATTTTGCTTAAC (SEQ ID NO: 1993) |
| | | KHS1, | protein kinase kinase | | GAAGGGGTGTGTATGTCTAGCTGTG (SEQ ID NO: 1994) |
| | | MAPKKKK5 | kinase kinase 5 | | ATGTCTAGCTGTGTCTACCATGTGT (SEQ ID NO: 1995) |
| | | | | | GTCTACCATGTGTATGTATTCTTGA (SEQ ID NO: 1996) |
| | | | | | AATCTTCATATATATTATCATCCCT (SEQ ID NO: 1997) |
| | | | | | ATATTATCATCCCTAATGTAGCAGG (SEQ ID NO: 1998) |
| | | | | | GGGAAGTATTTAATTGCCCATGATA (SEQ ID NO: 1999) |
| | | | | | ATTTTACTTATACTATGCCAGAGAG (SEQ ID NO: 2000) |
| | | | | | TTACACATGTAATCTTGGGTTTTTC (SEQ ID NO: 2001) |
| | | | | | GTTTTTCACATATGTAGGTATTCAT (SEQ ID NO: 2002) |
| | | | | | GAATTCCTGATGGGATAGTATCAAT (SEQ ID NO: 2003) |
| 212871_at | MAPKAPK5 | MAPKAPK5, | mitogen-activated | 8550 | TGCCTTCTGCTCAGCTGATGATGGA (SEQ ID NO: 2004) |
| | | PRAK | protein kinase- | | GTTGCAGGAATCCAGCAGGCTCACG (SEQ ID NO: 2005) |
| | | | activated protein | | GGCTCACGCGGAACAGTTGGCCAAC (SEQ ID NO: 2006) |
| | | | kinase 5 | | GGCCAACATGAGAATCCAGGATCTG (SEQ ID NO: 2007) |
| | | | | | ACAACCCCATTCTGCGGAAGAGGAA (SEQ ID NO: 2008) |
| | | | | | AGAGGAAGTTACTTGGCACCAAGCC (SEQ ID NO: 2009) |
| | | | | | GACAGTGTCTATATCCACGACCATG (SEQ ID NO: 2010) |
| | | | | | GGAGCCGAGGATTCCAATGTTGCCT (SEQ ID NO: 2011) |
| | | | | | ATGTGATTGCTCAGTGTATTCTCCC (SEQ ID NO: 2012) |
| | | | | | CCCACGAATCCCAATAATGACAGCT (SEQ ID NO: 2013) |
| | | | | | ATGACAGCTTCAGACTTTGTTTTTT (SEQ ID NO: 2014) |
| 205018_s_at | MBNL2 | RP11-128N14.1, | muscleblind-like 2 | 10150 | CCTGTTTCCTCCTCAATAGAATTGC (SEQ ID NO: 2015) |
| | | DKFZp781H1296, | (Drosophila) | | GTTCTTCTGGACAGACCACAACTCT (SEQ ID NO: 2016) |
| | | MBLL, MBLL39, | | | GAAGCTAGTGCTGCTATCTCATATA (SEQ ID NO: 2017) |
| | | MGC120625, | | | GATAGTTAACTACCTGAGACCAGCT (SEQ ID NO: 2018) |
| | | MGC120626, | | | AGGAATATTGTCTTATCTCCATAAC (SEQ ID NO: 2019) |
| | | MGC120628, | | | CAAGGGCAGGTTCGATTCTAGCTCT (SEQ ID NO: 2020) |
| | | PRO2032 | | | TTCTAGCTCTAATTACTGTCATGTC (SEQ ID NO: 2021) |
| | | | | | TACTGTCATGTCATTTACCCACTGG (SEQ ID NO: 2022) |
| | | | | | GGTATGTTTCACTTCTTGACAATAT (SEQ ID NO: 2023) |
| | | | | | AACCGATACCTGTCCTGCAGGTCTA (SEQ ID NO: 2024) |
| | | | | | CAAGCACAAGTACTGGGGACACATC (SEQ ID NO: 2025) |
| 201755_at | MCM5 | CDC46, | minichromosome | 4174 | CATCGCGGAAGCCCTCAGCAAGATG (SEQ ID NO: 2026) |
| | | MGC5315, P1- | maintenance | | GCTCTTCCAAGTGTCCACGTTGGAT (SEQ ID NO: 2027) |
| | | CDC46 | complex component 5 | | TTGTCCGGTACCCTGTCAGGGGTGG (SEQ ID NO: 2028) |
| | | | | | TGTCAGGGGTGGAGGGCTTCACCAG (SEQ ID NO: 2029) |
| | | | | | GAGGACCAGGAGATGCTGAGCCGCA (SEQ ID NO: 2030) |
| | | | | | ATGCTGAGCCGCATCGAGAAGCAGC (SEQ ID NO: 2031) |
| | | | | | CATCGAGAAGCAGCTCAAGCGCCGC (SEQ ID NO: 2032) |
| | | | | | TCCCAGGTGTCTGAGCACAGCATCA (SEQ ID NO: 2033) |
| | | | | | GCACAGCATCATCAAGGACTTCACC (SEQ ID NO: 2034) |
| | | | | | GGACTTCACCAAGCAGAAATACCCG (SEQ ID NO: 2035) |
| | | | | | CGCCCGCTCTAGCGGGTTCTGGGAA (SEQ ID NO: 2036) |
| 216237_s_at | MCM5 | CDC46, | minichromosome | 4174 | CGGCGAGATCCAGCATCGCATGCAG (SEQ ID NO: 2037) |
| | | MGC5315, P1- | maintenance | | GCGAGATCCAGCATCGCATGCAGCG (SEQ ID NO: 2038) |
| | | CDC46 | complex component 5 | | CCAGCATCGCATGCAGCGCAAGGTT (SEQ ID NO: 2039) |
| | | | | | GCATCGCATGCAGCGCAAGGTTCTC (SEQ ID NO: 2040) |
| | | | | | TCGCATGCAGCGCAAGGTTCTCTAC (SEQ ID NO: 2041) |
| | | | | | CTGCCTGCCATTGACAATGTTGCTG (SEQ ID NO: 2042) |
| | | | | | TTGACAATGTTGCTGGGACCTCTGC (SEQ ID NO: 2043) |
| | | | | | GAGGAAGGAGCTGTAGTGTCCTGCT (SEQ ID NO: 2044) |
| | | | | | GAAGGAGCTGTAGTGTCCTGCTGCC (SEQ ID NO: 2045) |
| | | | | | GTTCTGGGAAGTGTGCTTTTGGCAT (SEQ ID NO: 2046) |
| | | | | | CTGGGAAGTGTGCTTTTGGCATCCG (SEQ ID NO: 2047) |
| 202556_s_at | MCRS1 | ICP22BP, | microspherule protein 1 | 10445 | GGGTCCGGCCTGGAAGATATCCCGG (SEQ ID NO: 2048) |
| | | INO80Q, | | | GAACAACGGTGATTTCTTCATTGCC (SEQ ID NO: 2049) |
| | | MCRS2, MSP58, | | | TGCCAATGAGGGTCGACGGCCCATC (SEQ ID NO: 2050) |
| | | P78 | | | GACGGCCCATCTACATCGATGGACG (SEQ ID NO: 2051) |
| | | | | | CGCCTCAGCAACAACTCTGTGGTGG (SEQ ID NO: 2052) |
| | | | | | TCGTCTTCCTTATCAACCAGGACCT (SEQ ID NO: 2053) |
| | | | | | AGGAGTGGTGGCAGGACTCGTGGGC (SEQ ID NO: 2054) |
| | | | | | TGAGCTGGGAACTCAGGCTCCTGGA (SEQ ID NO: 2055) |
| | | | | | GCTGCGGGCCATTGATTTGAGCCTT (SEQ ID NO: 2056) |
| | | | | | GAGGGAGGATAGGGCTGGCCTTTGT (SEQ ID NO: 2057) |
| | | | | | GTCTCCAGCTGATTAGCCTCAGACT (SEQ ID NO: 2058) |
| 219051_x_at | METRN | MGC2601; | meteorin, glial cell | 79006 | CGCTTTGAGCTGCGCGAGGACGGGC (SEQ ID NO: 2059) |
| | | C16orf23; | differentiation | | GCACCAGCGACTTCGTAATTCACGG (SEQ ID NO: 2060) |
| | | c380A1.2 | regulator | | CAGCGACTTCGTAATTCACGGGATC (SEQ ID NO: 2061) |
| | | | | | TCACGGGATCATCCATGGGGTCACC (SEQ ID NO: 2062) |
| | | | | | TCACCCATGACGTGGAGCTGCAGGA (SEQ ID NO: 2063) |
| | | | | | GCTGCAGGAGTCTGTCATCACTGTG (SEQ ID NO: 2064) |
| | | | | | TCATGGGCTGGAGCCGCTTTGGGGA (SEQ ID NO: 2065) |
| | | | | | GCTGCACTGAGGGGCTGGGTGCTGG (SEQ ID NO: 2066) |
| | | | | | TGCTGGGGAGGGGCTGGTAGGAGGG (SEQ ID NO: 2067) |
| | | | | | TGGTAGGAGGGAGGGTGGGCCCACT (SEQ ID NO: 2068) |
| | | | | | GGCCCACTGCTTTGGAGGTGATGGG (SEQ ID NO: 2069) |
| 213653_at | METTL3 | M6A, MGC4336, | methyltransferase | 56339 | CTGTTATCTGTGGTGAGCAGGTTGG (SEQ ID NO: 2070) |
| | | MT-A70, Spo8 | like 3 | | ATCTGTGGTGAGCAGGTTGGTGTCA (SEQ ID NO: 2071) |
| | | | | | GTGGTGAGCAGGTTGGTGTCAAAGG (SEQ ID NO: 2072) |
| | | | | | GATCGTAGCTGAGGTATGTGCTTCC (SEQ ID NO: 2073) |
| | | | | | TAGCTGAGGTATGTGCTTCCCAGGC (SEQ ID NO: 2074) |
| | | | | | CCTCCAAAGCTTCCACATTTTTGTT (SEQ ID NO: 2075) |
| | | | | | GGGTGTATTCTCATCCCAGATTTTT (SEQ ID NO: 2076) |
| | | | | | GATTTTTCTCATTTAGATCATAAAC (SEQ ID NO: 2077) |
| | | | | | GAAAGGGCTAGAATTGCAATCTTGT (SEQ ID NO: 2078) |
| | | | | | GGCTAGAATTGCAATCTTGTGTAAC (SEQ ID NO: 2079) |
| | | | | | GAATTGCAATCTTGTGTAACTTAAA (SEQ ID NO: 2080) |
| 213457_at | MFHAS1 | FLJ23354, | malignant fibrous | 9258 | TCACCCCAGCGTGTTCTGTGAACTT (SEQ ID NO: 2081) |
| | | LRRC65, MASL1 | histiocytoma | | TGACAACGCGTGCTTGCAGGGTGCT (SEQ ID NO: 2082) |
| | | | amplified sequence 1 | | AGGGTGCTTTTTGGATGACTGGGGA (SEQ ID NO: 2083) |
| | | | | | GAACCTCAGAACTGTGATCCTCCAA (SEQ ID NO: 2084) |
| | | | | | TCCTCCAAGGAGCGCGCTACTTGAA (SEQ ID NO: 2085) |
| | | | | | GTCGAATGGCTTCTCAGGGATTTTG (SEQ ID NO: 2086) |
| | | | | | GGGATTTTGTTTTCCGTGCACATAT (SEQ ID NO: 2087) |
| | | | | | AGAGCACTCAGATTTCAGTTCTGTT (SEQ ID NO: 2088) |
| | | | | | GAGGGATCGACTGACGTTCATTGCT (SEQ ID NO: 2089) |
| | | | | | GACGTTCATTGCTGTTCCATAACTA (SEQ ID NO: 2090) |
| | | | | | GAAGCTTCTAGCGTTAGTTCACACT (SEQ ID NO: 2091) |
| 207013_s_at | MMP16 | MMP-X2, MT- | matrix | 4325 | CTATCCCAAGCCAATCACAGTCTGG (SEQ ID NO: 2092) |
| | | MMP2, MT- | metallopeptidase 16 | | TCCTCAGGGAGCATTTGTACACAAA (SEQ ID NO: 2093) |
| | | MMP3, MT3- | (membrane-inserted) | | GACACAGCCCACCAGATGATGTAGA (SEQ ID NO: 2094) |
| | | MMP | | | AACTGGACAACACAGCCAGCACTGT (SEQ ID NO: 2095) |
| | | | | | AGCCATAGCTATTGTCATTCCCTGC (SEQ ID NO: 2096) |
| | | | | | ATGCCTCCTTGTATTGGTTTACACT (SEQ ID NO: 2097) |
| | | | | | TACTGTACTGTAAACGCTCTATGCA (SEQ ID NO: 2098) |
| | | | | | GAGTGGGTGTGATGTAGGGTTTTTT (SEQ ID NO: 2099) |
| | | | | | GCTGTTATGCTGTTTCCTAGCTAGG (SEQ ID NO: 2100) |
| | | | | | TAGCTAGGAGCAGGCTTGTGGCAGC (SEQ ID NO: 2101) |
| | | | | | TTGTGGCAGCCTGATTCGGGGCTGA (SEQ ID NO: 2102) |
| 205828_at | MMP3 | MGC126102, | matrix | 4314 | GAAAATCGATGCAGCCATTTCTGAT (SEQ ID NO: 2103) |
| | | MGC126103, | metallopeptidase 3 | | TTTATTTCTTTACTGGATCTTCACA (SEQ ID NO: 2104) |
| | | MGC126104, | (stromelysin 1, | | GATCTTCACAGTTGGAGTTTGACCC (SEQ ID NO: 2105) |
| | | MMP-3, SL-1, | progelatinase) | | TAATTCTTCACCTAAGTCTCTGTGA (SEQ ID NO: 2106) |
| | | STMY, STMY1, | | | ATTGAAATGTTCGTTTTCTCCTGCC (SEQ ID NO: 2107) |
| | | STR1 | | | GTGACTCGAGTCACACTCAAGGGAA (SEQ ID NO: 2108) |
| | | | | | TGAGCGTGAATCTGTATCTTGCCGG (SEQ ID NO: 2109) |
| | | | | | GTATCTTGCCGGTCATTTTTATGTT (SEQ ID NO: 2110) |
| | | | | | CAAATGGGCTGCTGCTTAGCTTGCA (SEQ ID NO: 2111) |
| | | | | | TTAGCTTGCACCTTGTCACATAGAG (SEQ ID NO: 2112) |
| | | | | | GGGGAAGCACTCGTGTGCAACAGAC (SEQ ID NO: 2113) |
| 218853_s_at | MOSPD1 | RP3-473B4.2, | motile sperm domain | 56180 | GTCCCCTAAGCACAACTATTTACAT (SEQ ID NO: 2114) |
| | | DJ473B4 | containing 1 | | TACATTTCTTTATAGCCTCTTCTGA (SEQ ID NO: 2115) |
| | | | | | TTATAGCCTCTTCTGATCTCTAACA (SEQ ID NO: 2116) |
| | | | | | GTAACTGATCTTTTGTCTAAGGATT (SEQ ID NO: 2117) |
| | | | | | GAACTTATGCACTGCTACTGTAGTA (SEQ ID NO: 2118) |
| | | | | | AACAGTCTCTGCTTCTAAAAACTTC (SEQ ID NO: 2119) |
| | | | | | AAAACTTCTATGTCTAGTCTTCCAT (SEQ ID NO: 2120) |
| | | | | | TAGGAAATCCTCACTGTTTAACCAT (SEQ ID NO: 2121) |
| | | | | | GGAGCCTAAGTCATTAAACGGATCA (SEQ ID NO: 2122) |
| | | | | | AACGGATCATGTCTGTACATTGTGT (SEQ ID NO: 2123) |
| | | | | | GGAGGCTATTCTTGTTTCTCCATCT (SEQ ID NO: 2124) |
| 64883_at | MOSPD2 | MGC26706 | motile sperm domain | 158747 | CAGTTGTCTGCCTGTAAAATGTTGA (SEQ ID NO: 2125) |
| | | | containing 2 | | CTGCCTGTAAAATGTTGAGTTTCGA (SEQ ID NO: 2126) |
| | | | | | GATATAACAGTTCCTTCAAAATTGG (SEQ ID NO: 2127) |
| | | | | | TTCCTTCAAAATTGGCCTAGGAAAT (SEQ ID NO: 2128) |
| | | | | | CACCTCCAGCTGTGAAATGGACTGC (SEQ ID NO: 2129) |
| | | | | | TCCAGCTGTGAAATGGACTGCAGTC (SEQ ID NO: 2130) |
| | | | | | TGAAATGGACTGCAGTCCACCCTAA (SEQ ID NO: 2131) |
| | | | | | CCTGTGTGTGTGCACAGTGGCTTCC (SEQ ID NO: 2132) |
| | | | | | TATGTTTTCTGTTCCTTGGCAAATA (SEQ ID NO: 2133) |
| | | | | | GTTTTCTGTTCCTTGGCAAATAAAT (SEQ ID NO: 2134) |
| | | | | | CTGTTCCTTGGCAAATAAATGAAGA (SEQ ID NO: 2135) |
| | | | | | AATGTATTGTCCTAACGGTGTCCCT (SEQ ID NO: 2136) |
| | | | | | TGTCCTAACGGTGTCCCTTTAATGT (SEQ ID NO: 2137) |
| | | | | | TAACGGTGTCCCTTTAATGTTTCAT (SEQ ID NO: 2138) |
| | | | | | GTGTCCCTTTAATGTTTCATATGAA (SEQ ID NO: 2139) |
| | | | | | AATATCCTTGCTCAATGTCTGGTCA (SEQ ID NO: 2140) |
| 221771_s_at | MPHOSPH8 | RP11-523H24.1, | M-phase | 54737 | CTATACTCTCTTTGACAGCAGTTTG (SEQ ID NO: 2141) |
| | | FLJ35237, | phosphoprotein 8 | | GACAGCAGTTTGGAATTCTTCTAGC (SEQ ID NO: 2142) |
| | | HSMPP8, TWA3, | | | GGAATTCTTCTAGCACATCTATGTA (SEQ ID NO: 2143) |
| | | mpp8 | | | AGTTTTGTCTGTAAACCTCTTGCAG (SEQ ID NO: 2144) |
| | | | | | GTGTCTGTGCCAGTATGCCGGAATC (SEQ ID NO: 2145) |
| | | | | | TGCCAGTATGCCGGAATCTCAGTGC (SEQ ID NO: 2146) |
| | | | | | GCCGGAATCTCAGTGCAGTGTCCAG (SEQ ID NO: 2147) |
| | | | | | GGAATCTCAGTGCAGTGTCCAGACT (SEQ ID NO: 2148) |
| | | | | | CAGTGTCCAGACTGCGTATTTCAGT (SEQ ID NO: 2149) |
| | | | | | TGCGTATTTCAGTTTTTCCACAATG (SEQ ID NO: 2150) |
| | | | | | GTGGATAGTACATATGAGGATTATT (SEQ ID NO: 2151) |
| 217980_s_at | MRPL16 | FLJ20484, | mitochondrial | 54948 | TTGGGCATCGCATGGGGGGAGGCAA (SEQ ID NO: 2152) |
| | | L16mt, MRP-L16, | ribosomal protein L16 | | GTGCTATTGACCACTACGTGACACC (SEQ ID NO: 2153) |
| | | PNAS-111 | | | ACGTGACACCTGTGAAGGCTGGCCG (SEQ ID NO: 2154) |
| | | | | | GCAAGGTTTCCTTGACCAGGTTGCC (SEQ ID NO: 2155) |
| | | | | | TTGCCCTTCGCAGCAAAGGCTGTGA (SEQ ID NO: 2156) |
| | | | | | CTGTGAGCCGCGGGACTCTAGAGAA (SEQ ID NO: 2157) |
| | | | | | AGAACCCCTGGACATTTGAGCGAAT (SEQ ID NO: 2158) |
| | | | | | AGCGAATAGCCACTGCCAACATGCT (SEQ ID NO: 2159) |
| | | | | | GTACTGAGCCCATATGACTTGACCC (SEQ ID NO: 2160) |
| | | | | | TCAGCCTACCCACTGAAGTCTTTGG (SEQ ID NO: 2161) |
| | | | | | GTCTTTGGGTAGCTCTTAAGCCATA (SEQ ID NO: 2162) |
| 203152_at | MRPL40 | FLJ41774, | mitochondrial | 64976 | TATTACCCCTCTAAAGTTCTTGGAT (SEQ ID NO: 2163) |
| | | MGC9400, MRP- | ribosomal protein L40 | | AGCAAGAGAGCGGCCTCAGGTGGAG (SEQ ID NO: 2164) |
| | | L22, NLVCF, | | | GGAGCTCACCTTTGAGGAGACTGAG (SEQ ID NO: 2165) |
| | | URIM | | | GACACCATCAGGGCTATGCTAGAAG (SEQ ID NO: 2166) |
| | | | | | GAAGCTCTGGAGGAACTGCAACTGG (SEQ ID NO: 2167) |
| | | | | | AACTGCAACTGGAATCCCCGAAGCT (SEQ ID NO: 2168) |
| | | | | | TCCATGCTGAGGCCATCAAGCGGGA (SEQ ID NO: 2169) |
| | | | | | ATCAAGCGGGATCCTAACCTGTTCC (SEQ ID NO: 2170) |
| | | | | | GAAGGAAGGGCCACATTACACACCA (SEQ ID NO: 2171) |
| | | | | | GGCTGCTATCCTTAACATGCTGCCC (SEQ ID NO: 2172) |
| | | | | | TTAACATGCTGCCCCTGAGAGTAGG (SEQ ID NO: 2173) |
| 219244_s_at | MRPL46 | LIECG2; | mitochondrial | 26589 | GGAACCTTGTCCTGTTAGTCAGAGA (SEQ ID NO: 2174) |
| | | P2ECSL; | ribosomal protein L46 | | CAGGATGTTTGGATACTGCCCCAGG (SEQ ID NO: 2175) |
| | | C15orf4; | | | GCCTGGGGAGACCCTTCGAGGAACA (SEQ ID NO: 2176) |
| | | MGC22762 | | | GAAATGCACCCTGTGGGCACTACAC (SEQ ID NO: 2177) |
| | | | | | GTAACCTCGGAGCCAAGGIGTTCTT (SEQ ID NO: 2178) |
| | | | | | GGTGTTCTTCTTCAAAGCACTGCTA (SEQ ID NO: 2179) |
| | | | | | ACTGGAGACTTTTCCCAGGCTGGGA (SEQ ID NO: 2180) |
| | | | | | AAGGGCCATCATGTGTGGGTCACTA (SEQ ID NO: 2181) |
| | | | | | TTTCAGACCTCTGATGGGCCGAGCT (SEQ ID NO: 2182) |
| | | | | | GTGGACGGTGCTCAGACAAGTCTGG (SEQ ID NO: 2183) |
| | | | | | GTGATTGCCTCACATTTGCAGGTAA (SEQ ID NO: 2184) |
| 211595_s_at | MRPS11 | FLJ22512, | mitochondrial | 64963 | ACACAGATCCAGGTAGTCTCTGCTA (SEQ ID NO: 2185) |
| | | FLJ23406, HCC-2 | ribosomal protein | | GTCTCTGCTAGTAATGAGCCCCTTG (SEQ ID NO: 2186) |
| | | | S11 | | AGCACAGACAGCAGGCATAGCCGCA (SEQ ID NO: 2187) |
| | | | | | AGCCGCAGCGGCGAGAGCTAAACAA (SEQ ID NO: 2188) |
| | | | | | CAAAAGGGCGTGATCCACATCCGAG (SEQ ID NO: 2189) |
| | | | | | TTGTCTGCCATGCACGGACTGATCA (SEQ ID NO: 2190) |
| | | | | | GGACTGATCATGGGCGGCCTGGAAG (SEQ ID NO: 2191) |
| | | | | | CTCAGCTCCAGTGGGACCTTGTAAA (SEQ ID NO: 2192) |
| | | | | | GGACCTTGTAAAATGCTCCCTGTCA (SEQ ID NO: 2193) |
| | | | | | TCCCTGTCAGAGCTCTCCAGAATAT (SEQ ID NO: 2194) |
| | | | | | GGTGTGCCCCAGAAGTAAGCTTTGC (SEQ ID NO: 2195) |
| 212096_s_at | MTUS1 | ATIP; MP44; | mitochondrial tumor | 57509 | TGGGTCATTTACATGTACACTACAT (SEQ ID NO: 2196) |
| | | MTSG1; | suppressor 1 | | GATACTCATGTTGCATGTTCTTTTA (SEQ ID NO: 2197) |
| | | FLJ14295; | | | TAGTGATTTTGTGTCTTAAGTCTTT (SEQ ID NO: 2198) |
| | | KIAA1288; | | | TAAGTCTTTAACTTCCAATACTTCA (SEQ ID NO: 2199) |
| | | DKFZp586D1519; | | | GTATGTAACCTTCCATGTTTGCTTC (SEQ ID NO: 2200) |
| | | DKFZp686F20243 | | | GGAAATGTAGGTTCACTGCCACTTC (SEQ ID NO: 2201) |
| | | | | | GGTTCACTGCCACTTCATGAGATAT (SEQ ID NO: 2202) |
| | | | | | CATGAGATATCTCTGCTCACGCTTC (SEQ ID NO: 2203) |
| | | | | | CAAAGTTGGGTTTGCCATTCATCCC (SEQ ID NO: 2204) |
| | | | | | ATGGTAAATCTTGTGTTGTTCCCTG (SEQ ID NO: 2205) |
| | | | | | TGTCCTCCGTATTACGTGACCGGCA (SEQ ID NO: 2206) |
| 204056_s_at | MVK | FLJ96772, LRBP, | mevalonate kinase | 4598 | GCTCCTGACACTGCTGGAGAGGCCC (SEQ ID NO: 2207) |
| | | MK, MVLK | | | GCAGTCCCAGCGGTGGGACCTAGGG (SEQ ID NO: 2208) |
| | | | | | ACCTAGGGAGGCATGGTCTGCCCTC (SEQ ID NO: 2209) |
| | | | | | CCAGCCGAGCAGGAGGCCTAGGAGG (SEQ ID NO: 2210) |
| | | | | | GCCTAGGAGGGTCCTCTGAGACTCC (SEQ ID NO: 2211) |
| | | | | | CTGAGACTCCAGACCTGAGGCGAGA (SEQ ID NO: 2212) |
| | | | | | TGAGGCGAGAAGGGCTGCTTCCCTG (SEQ ID NO: 2213) |
| | | | | | CCTGGGTCCAATGCTCAGGTGCTGG (SEQ ID NO: 2214) |
| | | | | | GGGCCTGGTTCCCGGAGAAGTGTGC (SEQ ID NO: 2215) |
| | | | | | CCTTCTACCTAGCGGGATGGGGCTC (SEQ ID NO: 2216) |
| | | | | | CTTTCTTCCGATCTGTACCTGAGAG (SEQ ID NO: 2217) |
| 203359_s_at | MYCBP | AMY-1 | c-myc binding protein | 26292 | TGTGCTGTTTTTCAATTTGCCTAAT (SEQ ID NO: 2218) |
| | | | | | GCCTGCCTTATTTGCTTACTGAGCA (SEQ ID NO: 2219) |
| | | | | | CAACTCTGGGTTCACACACAAGCTG (SEQ ID NO: 2220) |
| | | | | | AATTATATAGTGCTTTTCTCCCTCA (SEQ ID NO: 2221) |
| | | | | | TCTCCCTCAAAGTATTTTTCTAGCC (SEQ ID NO: 2222) |
| | | | | | ATTCATTTTATCTTCATTATCCCTG (SEQ ID NO: 2223) |
| | | | | | GAGGGGTGCTGAATTTTTAGGCCAA (SEQ ID NO: 2224) |
| | | | | | ATCACTCACTAACTGTAGAGCCTTG (SEQ ID NO: 2225) |
| | | | | | GAGCCTTGGGCATTATCAGTGAACT (SEQ ID NO: 2226) |
| | | | | | TACTCTGAGATTTACTGTCTTCATC (SEQ ID NO: 2227) |
| | | | | | TAATGAGTAGAATGTCCGTGATGCC (SEQ ID NO: 2228) |
| 214156_at | MYRIP | DKFZp586F1018, | myosin VIIA and Rab | 25924 | GGCTTTTTGTTCTGTTGGTGTGATT (SEQ ID NO: 2229) |
| | | FLJ44025, | interacting protein | | TGACTTCCGAATAGAATGTTTTCTT (SEQ ID NO: 2230) |
| | | MGC130034, | | | GCAACTATTGTTGTGTTACAGTGTT (SEQ ID NO: 2231) |
| | | MGC130035, | | | GTGTACTGTGTAAGCCTTGCAAACA (SEQ ID NO: 2232) |
| | | SLAC2-C, | | | AGCCTGCTGTGTGGCATCTGAACTT (SEQ ID NO: 2233) |
| | | SLAC2C | | | AGGTTTCCTTGTGCCAAATAAGTGC (SEQ ID NO: 2234) |
| | | | | | GCATATGTTATAGTTCCAGAAGAAT (SEQ ID NO: 2235) |
| | | | | | GGATAATATCTTTGATGACTTCTGA (SEQ ID NO: 2236) |
| | | | | | GATGACTTCTGAAAGTTATGCTTCC (SEQ ID NO: 2237) |
| | | | | | TTATGCTTCCCTTCATGTTATATGC (SEQ ID NO: 2238) |
| | | | | | CACATTGCCAAGAATTACTGTCAAG (SEQ ID NO: 2239) |
| 202259_s_at | N4BP2L2 | RP11-298P3.3, | NEDD4 binding | 10443 | TTTTTCCTTCACTACCTTAAATATG (SEQ ID NO: 2240) |
| | | 92M18.3, CG005, | protein 2-like 2 | | GGGTACCTTAGTTTTCTCTATTCAT (SEQ ID NO: 2241) |
| | | FLJ36195, | | | ATTTCAGCTGATTGATCTGTGTGAC (SEQ ID NO: 2242) |
| | | FLJ41089, | | | ATAATCAGCACATCACTTAGTTCAA (SEQ ID NO: 2243) |
| | | FLJ43077, | | | ACAAAATTCCCCAGCAAATGTTAGA (SEQ ID NO: 2244) |
| | | PFAAP5 | | | GTAGGTATATCAGTCACCTGGGGAG (SEQ ID NO: 2245) |
| | | | | | TGGGGAGTTTTCTTCATAATATGCA (SEQ ID NO: 2246) |
| | | | | | CATACATAGTTATCATCCTCCTTCT (SEQ ID NO: 2247) |
| | | | | | CCACATGCTTGCCAGTTCTTGAAGG (SEQ ID NO: 2248) |
| | | | | | TGGACAGTTGCTTAACATGGTCATA (SEQ ID NO: 2249) |
| | | | | | ATATTTCTCTCACTGGATAGTTTTT (SEQ ID NO: 2250) |
| 209272_at | NAB1 | | NGFI-A binding | 4664 | ACGTTTCCTGTATTCTAATCTATTT (SEQ ID NO: 2251) |
| | | | protein 1 (EGR1 | | ATCTTCCAACTTCCAATATTTATCC (SEQ ID NO: 2252) |
| | | | binding protein 1) | | TTTATCCATTCGTTGTGGACCCACA (SEQ ID NO: 2253) |
| | | | | | GTGGACCCACAGATTGCATCTTTAA (SEQ ID NO: 2254) |
| | | | | | TTATGTTTCTAGTCTTTCAAGCTTA (SEQ ID NO: 2255) |
| | | | | | GGTTACCTCAGTATTACAGCCAATA (SEQ ID NO: 2256) |
| | | | | | TATAGTCCAAGGGACCATTTCTCCC (SEQ ID NO: 2257) |
| | | | | | CCCGAGTCTCTTACACTTTATTGTG (SEQ ID NO: 2258) |
| | | | | | GATGTCCACGTTTTTGTGACTCTTC (SEQ ID NO: 2259) |
| | | | | | GAGGTGGGACGAATGCACTTGCTTC (SEQ ID NO: 2260) |
| | | | | | TGCACTTGCTTCCTGTGGCAATAAA (SEQ ID NO: 2261) |
| 218189_s_at | NANS | RP11-404F11.3, | N-acetylneuraminic | 54187 | CTTTCCTGACATTCCCATAGGGTAT (SEQ ID NO: 2262) |
| | | SAS | acid synthase (sialic | | AGCGATATCTGTGGCCGCAGTGGCT (SEQ ID NO: 2263) |
| | | | acid synthase) | | GGCTCTGGGGGCCAAGGTGTTGGAA (SEQ ID NO: 2264) |
| | | | | | GGAACGTCACATAACTTTGGACAAG (SEQ ID NO: 2265) |
| | | | | | GAGCCTGGAGAACTGGCCGAGCTGG (SEQ ID NO: 2266) |
| | | | | | AATTCCGGAAGGCACCATTCTAACA (SEQ ID NO: 2267) |
| | | | | | TTCTAACAATGGACATGCTCACCGT (SEQ ID NO: 2268) |
| | | | | | AAGGCTATCCTCCTGAAGACATCTT (SEQ ID NO: 2269) |
| | | | | | GAAGACATCTTTAATCTAGTGGGCA (SEQ ID NO: 2270) |
| | | | | | GTGGGCAAGAAGGTCCTGGTCACTG (SEQ ID NO: 2271) |
| | | | | | GAAGGTCCTGGTCACTGTTGAAGAG (SEQ ID NO: 2272) |
| 200027_at | NARS | ASNRS, NARS1 | asparaginyl-tRNA | 4677 | ATCTTTTCTAACTCTGCTTAGCTGC (SEQ ID NO: 2273) |
| | | | synthetase | | AGCTGCTAATAATCCTGAGGCATAG (SEQ ID NO: 2274) |
| | | | | | TAGTGATTCACAGTATCCCTCTTAG (SEQ ID NO: 2275) |
| | | | | | AGTATCCCTCTTAGCATTAATTTAA (SEQ ID NO: 2276) |
| | | | | | GAGGCAGATTGATTTTCCCTCTTTC (SEQ ID NO: 2277) |
| | | | | | CCCACCATGTCCTTAGATCTAATCT (SEQ ID NO: 2278) |
| | | | | | TAGATCTAATCTGTGCTACCTTATT (SEQ ID NO: 2279) |
| | | | | | GCTACCTTATTAACTCACAGCAGGC (SEQ ID NO: 2280) |
| | | | | | ACAGCAGGCTTACTGAATGGCTTCA (SEQ ID NO: 2281) |
| | | | | | CAGATTTAGTTGATTTCTCCACCAA (SEQ ID NO: 2282) |
| | | | | | GCATGTCATGTATTCTCAATAGGCT (SEQ ID NO: 2283) |
| 214440_at | NAT1 | AAC1, NATI | N-acetyltransferase 1 | 9 | GATGGGGTTCACTGTTTGGTGGGCT (SEQ ID NO: 2284) |
| | | | (arylamine N- | | TTCACCCTCACCCATAGGAGATTCA (SEQ ID NO: 2285) |
| | | | acetyltransferase) | | GAAAGCTTGTGCCCAAACATGGTGA (SEQ ID NO: 2286) |
| | | | | | AATCTTGTCTATTTGTCATCCAGCT (SEQ ID NO: 2287) |
| | | | | | CATCCAGCTCACCAGTTATCAACTG (SEQ ID NO: 2288) |
| | | | | | GTTATCAACTGACGACCTATCATGT (SEQ ID NO: 2289) |
| | | | | | GACGACCTATCATGTATCTTCTGTA (SEQ ID NO: 2290) |
| | | | | | TATCATGTATCTTCTGTACCCTTAC (SEQ ID NO: 2291) |
| | | | | | AATCCTAGACATCAAATCATTTCAC (SEQ ID NO: 2292) |
| | | | | | AGATGGCCTGTGGTTATCTTGGAAA (SEQ ID NO: 2293) |
| | | | | | GTTGGTTTATTGTTGAATTCCTAGA (SEQ ID NO: 2294) |
| 209061_at | NCOA3 | RP5-1049G16.3, | nuclear receptor | 8202 | ATCTGAGGTGAGTTGGGGGTATCTA (SEQ ID NO: 2295) |
| | | ACTR, AIB-1, | coactivator 3 | | GGCTTGATGTCCTAGAAGTTCTTTG (SEQ ID NO: 2296) |
| | | AIB1, CAGH16, | | | AGTTCTTTGATCCAGAGGTGGGTGC (SEQ ID NO: 2297) |
| | | CTG26, KAT13B, | | | GAGGTGGGTGCAGCTGAAAGTAAAC (SEQ ID NO: 2298) |
| | | MGC141848, | | | TGCCAGTTACATGTATGCCTGCCCA (SEQ ID NO: 2299) |
| | | RAC3, SRC3, | | | CCAGTTCCCTTTTTATTTGCAGAAG (SEQ ID NO: 2300) |
| | | TNRC14, | | | TTTTGTTCACAATTAGGTTCCTAGG (SEQ ID NO: 2301) |
| | | TNRC16, TRAM- | | | AACGAGCAGGGTGTTTTCTCTCTTC (SEQ ID NO: 2302) |
| | | 1, pCIP | | | CAGGAATTGACTTATACTCTTGAGA (SEQ ID NO: 2303) |
| | | | | | ATGGGGGATGGTGAGCTGTGACTGC (SEQ ID NO: 2304) |
| | | | | | ACTGCTTTGCTGACCATTTTGGATG (SEQ ID NO: 2305) |
| 203478_at | NDUFC1 | MGC117464, | NADH | 4717 | GGGGCCCAAGGAATTCGCAAGATGG (SEQ ID NO: 2306) |
| | | MGC126847, | dehydrogenase | | AGGAATTCGCAAGATGGCGCCGTCC (SEQ ID NO: 2307) |
| | | MGC138266 | (ubiquinone) 1, | | GCCCTTCAGTGCGATCAAAGTTCTA (SEQ ID NO: 2308) |
| | | | subcomplex | | GTGCGATCAAAGTTCTACGTGCGAG (SEQ ID NO: 2309) |
| | | | unknown, 1, 6 kDa | | TTCTACGTGCGAGAGCCGCCGAATG (SEQ ID NO: 2310) |
| | | | | | CCGCCGAATGCCAAACCTGACTGGC (SEQ ID NO: 2311) |
| | | | | | ACCTGACTGGCTGAAAGTTGGGTTC (SEQ ID NO: 2312) |
| | | | | | TGAAAGTTGGGTTCACCTTGGGCAC (SEQ ID NO: 2313) |
| | | | | | GTCTTCTTGTGGATCTATCTCATCA (SEQ ID NO: 2314) |
| | | | | | GGATCTATCTCATCAAACAACACAA (SEQ ID NO: 2315) |
| | | | | | CAAGCCAGCATTTGTATTTTGCATC (SEQ ID NO: 2316) |
| 212530_at | NEK7 | | NIMA (never in | 140609 | AAGCTATATCTATTCTAAACCTTAT (SEQ ID NO: 2317) |
| | | | mitosis gene a)- | | TTAGACATTGGTACCAGTTACCCAG (SEQ ID NO: 2318) |
| | | | related kinase 7 | | GGTGGATGAAGGGTATCTCTATATA (SEQ ID NO: 2319) |
| | | | | | AAGTGCTCAACAATGTGCAATGATT (SEQ ID NO: 2320) |
| | | | | | GTAAGATATTACAGCCATTTCATGA (SEQ ID NO: 2321) |
| | | | | | ATGCTTTACCATTCAACATAGTATC (SEQ ID NO: 2322) |
| | | | | | GTATCTATTACAAAACACCTTTCTT (SEQ ID NO: 2323) |
| | | | | | AACACCTTTCTTGTATCCATATACT (SEQ ID NO: 2324) |
| | | | | | GTATCCATATACTTCAGGTGTTGCT (SEQ ID NO: 2325) |
| | | | | | AACCCACAAATGCATACTTACCCTG (SEQ ID NO: 2326) |
| | | | | | TTACCCTGTGCCTCATATTTCAATA (SEQ ID NO: 2327) |
| 204321_at | NEO1 | DKFZp547A066, | neogenin homolog 1 | 4756 | GAAGCCTGTGTCGAGGCAGCTTCCC (SEQ ID NO: 2328) |
| | | DKFZp547B146, | (chicken) | | TCCCTTTGCCTGCTGATATTCTGCA (SEQ ID NO: 2329) |
| | | HsT17534, NGN | | | GCAACCTGCATTTCACTTTGTGGTC (SEQ ID NO: 2330) |
| | | | | | TTTCACTTTGTGGTCAGGCCGTGTC (SEQ ID NO: 2331) |
| | | | | | CGTGTCTTTGTGCTGTGACTGCATC (SEQ ID NO: 2332) |
| | | | | | GTGACTGCATCACCTTTATGGAGTG (SEQ ID NO: 2333) |
| | | | | | GTCCTTGGTGTTCTCCACAAGTGGT (SEQ ID NO: 2334) |
| | | | | | GGTTGACATTTGACTGCTTGTTCCA (SEQ ID NO: 2335) |
| | | | | | TTTGACAGTGTGGGTCGTTCCTGGG (SEQ ID NO: 2336) |
| | | | | | TTCTGAGTCATTGCATCCTCTACCA (SEQ ID NO: 2337) |
| | | | | | TCTACCAGCTGTTAATCCATCACTC (SEQ ID NO: 2338) |
| 206948_at | NEU3 | FLJ12388, SIAL3 | sialidase 3 | 10825 | ATTTTGCCTTAGCTACTGCAGTGGA (SEQ ID NO: 2339) |
| | | | (membrane sialidase) | | TGGCTTGCTTTTGGACCTTGGATGT (SEQ ID NO: 2340) |
| | | | | | TTGGATGTGTCACCTGAACTCTCTG (SEQ ID NO: 2341) |
| | | | | | TCTGGACCTCAGGTTTCCATCTGTA (SEQ ID NO: 2342) |
| | | | | | ATCTTCTCATCCCTAGGACAAGCAT (SEQ ID NO: 2343) |
| | | | | | GCATAGTGCCTGCATGCTTCATGAT (SEQ ID NO: 2344) |
| | | | | | ATGATCAGTAAGTCCTGGCTGCATA (SEQ ID NO: 2345) |
| | | | | | ACCAGGGGACTTACCTTTTCACATG (SEQ ID NO: 2346) |
| | | | | | ACTTACCCCTCATCCGAGTGTGAGG (SEQ ID NO: 2347) |
| | | | | | CAAGCAGGTGTCATGGCAGGAAGGA (SEQ ID NO: 2348) |
| | | | | | GACCAGATCTGTATGATTTGTTCCA (SEQ ID NO: 2349) |
| 209289_at | NFIB | RP11-280O24.2, | nuclear factor I/B | 4781 | TGAACGAATTTATTTTCCCCTCAGT (SEQ ID NO: 2350) |
| | | HMGIC/NFIB, | | | TATGTTGGTTTAGCTGCAGCCTCCT (SEQ ID NO: 2351) |
| | | NFI-RED, NFIB2, | | | GTTGCATCAAGAACCCATAGGGTGT (SEQ ID NO: 2352) |
| | | NFIB3 | | | TGGGAACGCCAGGGTGTAGGATATA (SEQ ID NO: 2353) |
| | | | | | AGGATATAAAAACGCACTCTTGAGA (SEQ ID NO: 2354) |
| | | | | | GTGCTGAAAACTTGCATGGTGCTTT (SEQ ID NO: 2355) |
| | | | | | GGTGCTTTCAGACATTAGCCTTGTT (SEQ ID NO: 2356) |
| | | | | | GACAGATCCATAGTGTGCATGGGCA (SEQ ID NO: 2357) |
| | | | | | GGCAGACACATTTTGCCTCTATGTC (SEQ ID NO: 2358) |
| | | | | | ACTCTTTCCAGTAATCCTAATTTGC (SEQ ID NO: 2359) |
| | | | | | TGCACGAAGATATAATGTCCACATT (SEQ ID NO: 2360) |
| 204109_s_at | NFYA | CBF-A, CBF-B, | nuclear transcription | 4800 | ATGCAGGATCCAAACCAAGCCGATG (SEQ ID NO: 2361) |
| | | FLJ11236, HAP2, | factor Y, alpha | | CTAACCCCACGCCATGTGATGGAGC (SEQ ID NO: 2362) |
| | | NF-YA | | | GCTGATCAAGGTCATGTTTCTCACT (SEQ ID NO: 2363) |
| | | | | | ACATTGATGATCACATTCTGCCCTT (SEQ ID NO: 2364) |
| | | | | | CATTCTGCCCTTTACTACAGGACAG (SEQ ID NO: 2365) |
| | | | | | GAAGTTGCAAGCCTTTGTCTTACTC (SEQ ID NO: 2366) |
| | | | | | GTCTTACTCTTTCAGTCAGGACCTA (SEQ ID NO: 2367) |
| | | | | | GCCAGCCATCTCAGCAGGGAAGAAC (SEQ ID NO: 2368) |
| | | | | | GAACAACCTTCTCAACCAAAACTGC (SEQ ID NO: 2369) |
| | | | | | GGTGGGGGAATCTCACACTGACTAA (SEQ ID NO: 2370) |
| | | | | | GGACGCTTTGTATTCAGAGATGGCT (SEQ ID NO: 2371) |
| 217896_s_at | NIP30 | CDA018, CDA10, | NEFA-interacting | 80011 | GCAGGCAGAGCAGCTACTGACTTTG (SEQ ID NO: 2372) |
| | | FLJ21799, | nuclear protein NIP30 | | AGTACAGTGACACTCTGGTGCCCAT (SEQ ID NO: 2373) |
| | | MGC74898 | | | CATTGGCAGATGGCGACTTCCCTGC (SEQ ID NO: 2374) |
| | | | | | TTCCTCCTTTTCAGAACTACTCTGT (SEQ ID NO: 2375) |
| | | | | | ACTACTCTGTGCTAATTGTTCTGCC (SEQ ID NO: 2376) |
| | | | | | TGCCAGTATGGGCGCATCAGCTCCA (SEQ ID NO: 2377) |
| | | | | | AAACTTTGTAGGCACCTTCTGCTTC (SEQ ID NO: 2378) |
| | | | | | CTCTGCTTCATTGTTCCTGTGATAG (SEQ ID NO: 2379) |
| | | | | | GTTCCTGTGATAGTCCTGTTGTTAT (SEQ ID NO: 2380) |
| | | | | | GGAGGCAGGCCAGGACATCAAAGTC (SEQ ID NO: 2381) |
| | | | | | GTATCTCATGGCCTCTTGATGTGGA (SEQ ID NO: 2382) |
| 201591_s_at | NISCH | 1200007D05Rik, | nischarin | 11188 | TTGGGAGTGAGAATGCCGGGCCCCT (SEQ ID NO: 2383) |
| | | 3202002H23Rik, | | | CAGGGCTGTCGGTGTGCTGTCAGCC (SEQ ID NO: 2384) |
| | | AW494485, I-1 | | | ACACCAGTGTCGTGTCTGCTGTTGT (SEQ ID NO: 2385) |
| | | | | | GGGACCGTTGTTAACACGTGACACT (SEQ ID NO: 2386) |
| | | | | | GTGACACTGTGGGTCTGACTTTCTC (SEQ ID NO: 2387) |
| | | | | | ACGTCCTTTCCTGAAGTGTCGAGTC (SEQ ID NO: 2388) |
| | | | | | AGAATGCACATTGGAAGCTCCCACC (SEQ ID NO: 2389) |
| | | | | | CCCACCCCATATTGTTCTTCAAAGT (SEQ ID NO: 2390) |
| | | | | | TCAAAGTGGAGGTCTCCCCTGATCC (SEQ ID NO: 2391) |
| | | | | | CAGCACCAAGCGTGATTCCTGCTGC (SEQ ID NO: 2392) |
| | | | | | CTGCCTGTATTCTCTATTCCAATAA (SEQ ID NO: 2393) |
| 221691_x_at | NPM1 | B23, | nucleophosmin | 4869 | GGGGCTTTGAAATAACACCACCAGT (SEQ ID NO: 2394) |
| | | MGC104254, | (nucleolar | | CACCACCAGTGGTCTTAAGGTTGAA (SEQ ID NO: 2395) |
| | | NPM | phosphoprotein B23, | | GAAGTGTGGTTCAGGGCCAGTGCAT (SEQ ID NO: 2396) |
| | | | numatrin) | | GGGCCAGTGCATATTAGTGGACAGC (SEQ ID NO: 2397) |
| | | | | | TATATCTGGAAAGCGGTCTGCCCCT (SEQ ID NO: 2398) |
| | | | | | TCTGCCCCTGGAGGTGGTAGCAAGG (SEQ ID NO: 2399) |
| | | | | | GAGATACTCCAGCCAAAAATGCACA (SEQ ID NO: 2400) |
| | | | | | GACTCAAAACCATCATCAACACCAA (SEQ ID NO: 2401) |
| | | | | | ACACCAAAAGGACCTAGTTCTGTAG (SEQ ID NO: 2402) |
| | | | | | AAAGCGCATTGAACAGTCCTGGGCA (SEQ ID NO: 2403) |
| | | | | | AACAGTCCTGGGCACTACATGTAAA (SEQ ID NO: 2404) |
| 214066_x_at | NPR2 | AMDM, ANPRB, | natriuretic peptide | 4882 | AGAGCGGAAAGGACCTCCTGGACTC (SEQ ID NO: 2405) |
| | | GUC2B, | receptor B/guanylate | | CCAAGTCAGATAGTCTTCTGCTGCT (SEQ ID NO: 2406) |
| | | GUCY2B, NPRB, | cyclase B | | CAGATAGTCTTCTGCTGCTGGTACC (SEQ ID NO: 2407) |
| | | NPRBi | (atrionatriuretic | | TGCTGGTACCTGGGTGGGCAATGGC (SEQ ID NO: 2408) |
| | | | peptide receptor B) | | GGTGGGCAATGGCCACCATGTCTGC (SEQ ID NO: 2409) |
| | | | | | GAAATGGACATTTTCATATGCAATG (SEQ ID NO: 2410) |
| | | | | | ATATGCAATGGAAAACAGCCACAAA (SEQ ID NO: 2411) |
| | | | | | GCCACAAAAAAACCTACCTTATATG (SEQ ID NO: 2412) |
| | | | | | TATATGGAAGTTGTAGCCCTCTGCA (SEQ ID NO: 2413) |
| | | | | | CTTCCTCCCTACTTTCTGTAAATAT (SEQ ID NO: 2414) |
| | | | | | TCTGTAAATATCTGTATCTAAACCA (SEQ ID NO: 2415) |
| 219789_at | NPR3 | ANPRC, | natriuretic peptide | 4883 | TTATGATTAATCACCATCTGCCTCC (SEQ ID NO: 2416) |
| | | GUCY2B, NPRC | receptor C/guanylate | | CCAGGCCTTTCATCTCATGACAAAC (SEQ ID NO: 2417) |
| | | | cyclase C | | ATCGTGTCACTCTGTTAAATGTTCA (SEQ ID NO: 2418) |
| | | | (atrionatriuretic | | TGTTCATACTGTTTCAAGCCCATAT (SEQ ID NO: 2419) |
| | | | peptide receptor C) | | TGTTGTCTCCATATCTTGATGGCTT (SEQ ID NO: 2420) |
| | | | | | GGCTTTTGGGAGCATTTCACACAAG (SEQ ID NO: 2421) |
| | | | | | CAGGTTTGTGGTTGAGGACTTCTCT (SEQ ID NO: 2422) |
| | | | | | GGACTTCTCTGTCCGATGTCTACAT (SEQ ID NO: 2423) |
| | | | | | GTCTACATTCAGGTTCTGACTTCAT (SEQ ID NO: 2424) |
| | | | | | TCCCTGTCTTTTTCAGTGTCTCATA (SEQ ID NO: 2425) |
| | | | | | GTCTCATAAACGCTACTCTGGATTG (SEQ ID NO: 2426) |
| 219214_s_at | NT5C | DNT, DNT1, | 5′,3′-nucleotidase, | 30833 | GAAGTACCACCACTGTGTGGGTGAG (SEQ ID NO: 2427) |
| | | P5N2, PN-I, PN- | cytosolic | | AGTACCGCTGGGTGGAGCAGCACCT (SEQ ID NO: 2428) |
| | | II, UMPH2, cdN, | | | GTAGAACGAATTATCCTGACAAGGG (SEQ ID NO: 2429) |
| | | dNT-1 | | | TCTTGGGGGACCTGCTCATTGATGA (SEQ ID NO: 2430) |
| | | | | | GACAAGGACACAGTTCGAGGCCAGG (SEQ ID NO: 2431) |
| | | | | | GCCAGGAGGAGACCCCAAGCTGGGA (SEQ ID NO: 2432) |
| | | | | | CAAGCTGGGAGCACATCTTGTTCAC (SEQ ID NO: 2433) |
| | | | | | GATAGCAAGCGCGGAGCTGCGCAGC (SEQ ID NO: 2434) |
| | | | | | GCTGCGCAGCGGGAATGAGCGGGGA (SEQ ID NO: 2435) |
| | | | | | GGAATGAGCGGGGATGCCGCGGGCA (SEQ ID NO: 2436) |
| | | | | | AGGAAGGGCAGGCCCACAGGGGCCA (SEQ ID NO: 2437) |
| 205136_s_at | NUFIP1 | MGC95323 | nuclear fragile X | 26747 | AGGGATGTTGTTGATCCCCACACTG (SEQ ID NO: 2438) |
| | | | mental retardation | | ATCCCCACACTGCCTTAAGGTATAT (SEQ ID NO: 2439) |
| | | | protein interacting | | TCCCCTGGCTGTATGTCTGACAGTC (SEQ ID NO: 2440) |
| | | | protein 1 | | ATAGCCTGTATGGTTTCTACTTTAT (SEQ ID NO: 2441) |
| | | | | | GGGTGGGTAGAGGGGTGCTTTGCCT (SEQ ID NO: 2442) |
| | | | | | TGTTAATTGTTCAAACTTTCTGCCT (SEQ ID NO: 2443) |
| | | | | | ACATTCCTATCTTATTGTTCGTTTA (SEQ ID NO: 2444) |
| | | | | | GACTATTGGTGAGTTGTGCCTTTTA (SEQ ID NO: 2445) |
| | | | | | TTACTTTTTCTCATATCCTCTATAA (SEQ ID NO: 2446) |
| | | | | | ATAATTGACTTCTATTTTCCTTAAT (SEQ ID NO: 2447) |
| | | | | | TATTTTCCTTAATCAAACCAGCTCT (SEQ ID NO: 2448) |
| 209073_s_at | NUMB | S171 | numb homolog | 8650 | TTGTTTTTCAGGCCATTCACCTGCC (SEQ ID NO: 2449) |
| | | | (Drosophila) | | CCTGTCAGTAGTGGCCTGTATTAGA (SEQ ID NO: 2450) |
| | | | | | AAGAGTGGTTTGTGCTCAGGCTGGG (SEQ ID NO: 2451) |
| | | | | | GGAACAGAGAGGCACGCTATGCTGC (SEQ ID NO: 2452) |
| | | | | | CGCTATGCTGCCAGAATTCCCAGGA (SEQ ID NO: 2453) |
| | | | | | TTCCCAGGAGGGCATATCAGCAACT (SEQ ID NO: 2454) |
| | | | | | TTGAGCTTCCATTTTGAGTAACAGA (SEQ ID NO: 2455) |
| | | | | | TTTATCATTGATGCCTACTGAAATA (SEQ ID NO: 2456) |
| | | | | | AGACAGGATCCCTAGCTTGTTTTCT (SEQ ID NO: 2457) |
| | | | | | GCAACAACAATCATGCTTATGACCA (SEQ ID NO: 2458) |
| | | | | | GACCAATACAGTCACTAGGTTGTAG (SEQ ID NO: 2459) |
| 207563_s_at | OGT | FLJ23071, | O-linked N- | 8473 | AGCGTGTTCCCAATAGTGTACTCTG (SEQ ID NO: 2460) |
| | | HRNT1, | acetylglucosamine | | TACTCTGGCTGTTGCGTTTTCCAGC (SEQ ID NO: 2461) |
| | | MGC22921, O- | (GlcNAc) transferase | | GCCCCAGAACCGTATCATTTTTTCA (SEQ ID NO: 2462) |
| | | GLCNAC | (UDP-N- | | GAGGAACACGTCAGGAGAGGCCAGC (SEQ ID NO: 2463) |
| | | | acetylglucosamine:polypeptide- | | GGACACTCCACTCTGTAATGGGCAC (SEQ ID NO: 2464) |
| | | | N- | | GATGGATGTCCTCTGGGCAGGGACC (SEQ ID NO: 2465) |
| | | | acetylglucosaminyl | | ACCCCCATGGTGACTATGCCAGGAG (SEQ ID NO: 2466) |
| | | | transferase) | | AGGAGAGACTCTTGCTTCTCGAGTT (SEQ ID NO: 2467) |
| | | | | | ATCCCAGCTCACTTGCTTAGGTTGT (SEQ ID NO: 2468) |
| | | | | | GAGCGGCTCTATCTACAGATGTGGG (SEQ ID NO: 2469) |
| | | | | | TGCAGCTGGCAACAAACCTGACCAC (SEQ ID NO: 2470) |
| 212307_s_at | OGT | FLJ23071, | O-linked N- | 8473 | GATAACATACTTCTTACTTGTCTGT (SEQ ID NO: 2471) |
| | | HRNT1, | acetylglucosamine | | ACTTGTCTGTACAGTACCTTGTTGC (SEQ ID NO: 2472) |
| | | MGC22921, O- | (GlcNAc) transferase | | AGACTTGCTTCCTGCATGGTAGGGA (SEQ ID NO: 2473) |
| | | GLCNAC | (UDP-N- | | AACTGCTTTTCCACAAGGAATCTCC (SEQ ID NO: 2474) |
| | | | acetylglucosamine:polypeptide- | | GAATTTTGCGGCGACCAGATGGTGC (SEQ ID NO: 2475) |
| | | | N- | | AGGTCTGGAAGGTCTGATCTCCCTT (SEQ ID NO: 2476) |
| | | | acetylglucosaminyl | | TCCCTTGGTCTTCCATGGGATGGTT (SEQ ID NO: 2477) |
| | | | transferase) | | GGAGATATAGATTGTCCGGCCGCTT (SEQ ID NO: 2478) |
| | | | | | GGCCGCTTTGTGATTCCATGGATTG (SEQ ID NO: 2479) |
| | | | | | ATGTTACTCCCTGTTTTAGTTTCTG (SEQ ID NO: 2480) |
| | | | | | GGGACTTTGCTGGTGTAGTCTTTTT (SEQ ID NO: 2481) |
| 212213_x_at | OPA1 | FLJ12460, | optic atrophy 1 | 4976 | TTATGATATTGCCCTCTTTGTATTC (SEQ ID NO: 2482) |
| | | KIAA0567, | (autosomal dominant) | | TGTATTCCCATTTTCCACAGTTTTT (SEQ ID NO: 2483) |
| | | MGM1, NPG, | | | GTTTTTTCCGCAGACTTCTTTCTGC (SEQ ID NO: 2484) |
| | | NTG, largeG | | | AATTATTCAGCCTCCAAATGCAAAT (SEQ ID NO: 2485) |
| | | | | | ATGGCAGAGAGTGGTGCTTCCCAGC (SEQ ID NO: 2486) |
| | | | | | TGCTTCCCAGCCTCACAATGTGGGA (SEQ ID NO: 2487) |
| | | | | | TAATGGTTTTTCTCTCAGTTCTCTA (SEQ ID NO: 2488) |
| | | | | | AGTTCTCTAAGCTGGTCTATGTTAT (SEQ ID NO: 2489) |
| | | | | | AATATGCTTACCTTTTGAATGATCA (SEQ ID NO: 2490) |
| | | | | | AACTTACCTTGTTTTCACTTGTGCA (SEQ ID NO: 2491) |
| | | | | | ACTTATATTTTGCCTGAGCTTGATC (SEQ ID NO: 2492) |
| 222327_x_at | OR7E156P | | olfactory receptor, | 283491 | GGTACCTCCGTCGGCAGATTTGAGC (SEQ ID NO: 2493) |
| | | | family 7, subfamily E, | | AGATTTGAGCTTTCTCCTTGGACAC (SEQ ID NO: 2494) |
| | | | member 156 | | CCTTGGACACCTAATACCCACAGTC (SEQ ID NO: 2495) |
| | | | pseudogene | | TGCGTTCTGACACCTGTCGGATAGT (SEQ ID NO: 2496) |
| | | | | | GTCGGCAGATTTGAGCTTTCTTCTT (SEQ ID NO: 2497) |
| | | | | | TTTCTTCTTGGACACCTATACCCAC (SEQ ID NO: 2498) |
| | | | | | CAGTCCTCCAGTGTTTTAGACGCCC (SEQ ID NO: 2499) |
| | | | | | GCCCAGCTGCACAACTTGATTGCCT (SEQ ID NO: 2500) |
| | | | | | GATTGCCTTACAAATGACCTGCTTC (SEQ ID NO: 2501) |
| | | | | | ATGACCTGCTTCCAGGATGCGGAAA (SEQ ID NO: 2502) |
| | | | | | AATTCCTAATTTCTTCTGTGACCCT (SEQ ID NO: 2503) |
| 219073_s_at | OSBPL10 | FLJ20363, | oxysterol binding | 114884 | TGGTCACAGCGCTAGTCATTCATTT (SEQ ID NO: 2504) |
| | | ORP10, OSBP9 | protein-like 10 | | TGAAAACATGCACAACCACAGCCTC (SEQ ID NO: 2505) |
| | | | | | CCACAGCCTCAATCTTGTATTTAGT (SEQ ID NO: 2506) |
| | | | | | TTTCCTGTGGATTATTTTTTCCTCA (SEQ ID NO: 2507) |
| | | | | | GACTAAAACATACATAACGCCTGCA (SEQ ID NO: 2508) |
| | | | | | AACGCCTGCATAAATATTCCATGGT (SEQ ID NO: 2509) |
| | | | | | TTTCAGTTTTTAGCCTTTACACATG (SEQ ID NO: 2510) |
| | | | | | AATATCTGGTTTTTGCTGAATGCTT (SEQ ID NO: 2511) |
| | | | | | TTACTGTGCCACTCCAATATTTATC (SEQ ID NO: 2512) |
| | | | | | GCTTTCTTAAGACCAGTTGTTCACA (SEQ ID NO: 2513) |
| | | | | | GACCAGTTGTTCACACTTTGTAGAT (SEQ ID NO: 2514) |
| 209626_s_at | OSBPL3 | 1200014M06Rik, | oxysterol binding | 26031 | ATAGCTTCACACAGTTTGCGCTGGA (SEQ ID NO: 2515) |
| | | 6720421I08Rik, | protein-like 3 | | CAAAGTCTTTATTGCCACCTACTGA (SEQ ID NO: 2516) |
| | | A530055M08, | | | GACACTCGATTTAGGCCAGACCAGA (SEQ ID NO: 2517) |
| | | MGC102333, | | | GAGAGAAAGGCGGCGGGTCTTAGAA (SEQ ID NO: 2518) |
| | | ORP3, OSBP3 | | | GGAAATCCGACGATGACTCTTGGGT (SEQ ID NO: 2519) |
| | | | | | GAGCAACGGCACCTATTTGGAACTT (SEQ ID NO: 2520) |
| | | | | | ACTGGACCATCCTGTCTTATGGTGA (SEQ ID NO: 2521) |
| | | | | | ATAACATTAGTGTATTTCTCCTGTG (SEQ ID NO: 2522) |
| | | | | | GATGATCACTTGTGCTTAGCTTAGC (SEQ ID NO: 2523) |
| | | | | | TCTTTAAGTCTATATTTTCCTCAGT (SEQ ID NO: 2524) |
| | | | | | TTTCCTCAGTGCGTTTCTTTACAAT (SEQ ID NO: 2525) |
| 209627_s_at | OSBPL3 | 1200014M06Rik, | oxysterol binding | 26031 | GTTATGCCTTCTGGCTACTACAGAA (SEQ ID NO: 2526) |
| | | 6720421I08Rik, | protein-like 3 | | ACAGAATCTCCGCAGACCTTTTAGT (SEQ ID NO: 2527) |
| | | A530055M08, | | | GAAGGTGTCCTTATGGTCTTAGGAA (SEQ ID NO: 2528) |
| | | MGC102333, | | | ATAGCTATTTTCATTTGCTCTATTT (SEQ ID NO: 2529) |
| | | ORP3, OSBP3 | | | TGCTCTATTTTCCTCTGCATTGTAC (SEQ ID NO: 2530) |
| | | | | | GCATTGTACTAATCTGTTACTCAGT (SEQ ID NO: 2531) |
| | | | | | GTTACTCAGTGTTAGTCTTCATTTT (SEQ ID NO: 2532) |
| | | | | | GTGTTGGAAACCTGCGTCATGTAAA (SEQ ID NO: 2533) |
| | | | | | AATCTTCCACTTAACCACTGAAAAT (SEQ ID NO: 2534) |
| | | | | | AGCTCCTATTAATTTGCTTATCCCC (SEQ ID NO: 2535) |
| | | | | | TATCCCCCTCATGTAGCTAGTTGAA (SEQ ID NO: 2536) |
| 200656_s_at | P4HB | PDI | procollagen-proline, | 5034 | AGTGCCGACAGGACGGTCATTGATT (SEQ ID NO: 2537) |
| | | | 2-oxoglutarate 4- | | GGACGGTCATTGATTACAACGGGGA (SEQ ID NO: 2538) |
| | | | dioxygenase (proline | | GATTACAACGGGGAACGCACGCTGG (SEQ ID NO: 2539) |
| | | | 4-hydroxylase), beta | | TACAACGGGGAACGCACGCTGGATG (SEQ ID NO: 2540) |
| | | | polypeptide | | GGGAACGCACGCTGGATGGTTTTAA (SEQ ID NO: 2541) |
| | | | | | GAAGCAGAGGAGCCAGACATGGAGG (SEQ ID NO: 2542) |
| | | | | | AAGATGAACTGTAATACGCAAAGCC (SEQ ID NO: 2543) |
| | | | | | GTTTCCTGAAACCATGATGTACTTT (SEQ ID NO: 2544) |
| | | | | | GTACTTTTTCATACATGAGTCTGTC (SEQ ID NO: 2545) |
| | | | | | CATACATGAGTCTGTCCAGAGTGCT (SEQ ID NO: 2546) |
| | | | | | TGCTTGCTACCGTGTTCGGAGTCTC (SEQ ID NO: 2547) |
| 201013_s_at | PAICS | ADE2, ADE2H1, | phosphoribosylaminoimidazole | 10606 | AACTGGCATTACTGACTCCCAGCTA (SEQ ID NO: 2548) |
| | | AIRC, | carboxylase, | | CCAGCTATATTTCTCCAGACTTGCA (SEQ ID NO: 2549) |
| | | DKFZp781N1372, | phosphoribosylaminoimidazole | | AATTGCTGATGTGACCCATGAAGGG (SEQ ID NO: 2550) |
| | | MGC1343, | succinocarboxamide | | TTTTCCTCGTAATTTTGGACTGCCA (SEQ ID NO: 2551) |
| | | MGC5024, PAIS | synthetase | | TGGACTGCCACACATTGGTACCTTT (SEQ ID NO: 2552) |
| | | | | | ACATTGGTACCTTTAGTTCTCTGAA (SEQ ID NO: 2553) |
| | | | | | TTCTCTGAAGGCCCACGTTTTTATC (SEQ ID NO: 2554) |
| | | | | | GTAGAGCTTTATGTTCGCTGTCCAT (SEQ ID NO: 2555) |
| | | | | | GCTGTCCATGAAACCTTCTGTAACC (SEQ ID NO: 2556) |
| | | | | | TGACTACAAGTAGTTCTTTCTCTAT (SEQ ID NO: 2557) |
| | | | | | GCTATGCTTAGCTATCTGTCAGAGA (SEQ ID NO: 2558) |
| 212958_x_at | PAM | PAL, PHM | peptidylglycine alpha- | 5066 | AATTTCCACAGATACTTCCCTTAGA (SEQ ID NO: 2559) |
| | | | amidating | | TGAGCGAGGCCTTGTCAATTTTAAG (SEQ ID NO: 2560) |
| | | | monooxygenase | | TAGGAAGGACCACAACATGACCCGT (SEQ ID NO: 2561) |
| | | | | | TACACACTTTATTTACTTCGTTTTG (SEQ ID NO: 2562) |
| | | | | | GTTGGCTTCTGTTTCTAGTTGAGGA (SEQ ID NO: 2563) |
| | | | | | TCCTCTTTTTCCATCATAATTCTAA (SEQ ID NO: 2564) |
| | | | | | GATTTGCCCATTTACACTTTTGAGA (SEQ ID NO: 2565) |
| | | | | | GTAAATAACCCCATTCTTTGCTTGA (SEQ ID NO: 2566) |
| | | | | | GTATTTTCCCAATAGCACTTTCATT (SEQ ID NO: 2567) |
| | | | | | ATTGCCAGTGTCTTTCTTTGGTGCC (SEQ ID NO: 2568) |
| | | | | | TTCAGCATTCTTAGCCTGTGGCAAT (SEQ ID NO: 2569) |
| 219148_at | PBK | SPK; TOPK; | PDZ binding kinase | 55872 | AGCATACTATGCAGCGTTGGGAACT (SEQ ID NO: 2570) |
| | | Nori-3; FLJ14385 | | | CAGCGTTGGGAACTAGGCCACCTAT (SEQ ID NO: 2571) |
| | | | | | TGAACTCTTCTCTGTATGCACTAAT (SEQ ID NO: 2572) |
| | | | | | AGACCCTAAAGATCGTCCTTCTGCT (SEQ ID NO: 2573) |
| | | | | | ATGTCTAGTGATCATCTCAGCTGAA (SEQ ID NO: 2574) |
| | | | | | GTGTGGCTTGCGTAAATAACTGTTT (SEQ ID NO: 2575) |
| | | | | | GAGGACCATAGTTTCTTGTTAACAT (SEQ ID NO: 2576) |
| | | | | | AAGCACTTGGAATTGTACTGGGTTT (SEQ ID NO: 2577) |
| | | | | | GTACTTTGATACTGCTCATGCTGAC (SEQ ID NO: 2578) |
| | | | | | TGCTCATGCTGACTTAAAACACTAG (SEQ ID NO: 2579) |
| | | | | | GGATCTACTGACATTAGCACTTTGT (SEQ ID NO: 2580) |
| 204476_s_at | PC | PCB | pyruvate carboxylase | 5091 | GGTGACCTCACCCATGGAGGGTACT (SEQ ID NO: 2581) |
| | | | | | GGTACTGTCCGCAAGGTTCATGTGA (SEQ ID NO: 2582) |
| | | | | | TGGAAGGTGACGACCTCATCCTGGA (SEQ ID NO: 2583) |
| | | | | | GGAGATCGAGTGATCTTGCCCCAGA (SEQ ID NO: 2584) |
| | | | | | TCAACAGAAGCTGTGCTGCCACGGC (SEQ ID NO: 2585) |
| | | | | | CAGTGCCCGAGGCCAGGAAGGCCGG (SEQ ID NO: 2586) |
| | | | | | GACACCGCCTGCGGTGGTTCATTCC (SEQ ID NO: 2587) |
| | | | | | GACAGCTGCTTACATGTTCATCTCT (SEQ ID NO: 2588) |
| | | | | | ATCTCTTGCCAAATAAGGGTCCCCT (SEQ ID NO: 2589) |
| | | | | | GGGTCAGGTGGTCCTAGGACCCAGG (SEQ ID NO: 2590) |
| | | | | | AGATCTAAGATGTCCCAGGTCCTGG (SEQ ID NO: 2591) |
| 214239_x_at | PCGF2 | MEL-18, | polycomb group ring | 7703 | AGATTTCCTCAAGTGTGCATAGATC (SEQ ID NO: 2592) |
| | | MGC10545, | finger 2 | | GTGTGCATAGATCTGAGAGGAGTCG (SEQ ID NO: 2593) |
| | | RNF110, ZNF144 | | | GTCGAGACTCGAGATTCCATCATAG (SEQ ID NO: 2594) |
| | | | | | GAGATTCCATCATAGCGTAGGTGTG (SEQ ID NO: 2595) |
| | | | | | TAGCGTAGGTGTGTGGGGTTGGGAG (SEQ ID NO: 2596) |
| | | | | | CCCTGATGGGCTTGTCTGTGTTTGC (SEQ ID NO: 2597) |
| | | | | | CTGTGTCTGAGGTCCTGTGACTGTA (SEQ ID NO: 2598) |
| | | | | | TCTGAGGTCCTGTGACTGTACCCTC (SEQ ID NO: 2599) |
| | | | | | TCCTTTGCCCTGGGACATCTGTATC (SEQ ID NO: 2600) |
| | | | | | CATCTGTATCTCTTGGCTTTGTAAT (SEQ ID NO: 2601) |
| | | | | | GGCTTTGTAATAAATGCTGCATACT (SEQ ID NO: 2602) |
| 210836_x_at | PDE4D | DPDE3, | phosphodiesterase | 5144 | GACATAGCACGAATCTGTTACCAGT (SEQ ID NO: 2603) |
| | | HSPDE4D, | 4D, cAMP-specific | | AATTTTCTAATTTCAAGTCTTCCTG (SEQ ID NO: 2604) |
| | | PDE4DN2, | (phosphodiesterase | | GAATAGTGTGGTTCAGTGAGCTGCA (SEQ ID NO: 2605) |
| | | STRK1 | E3 dunce homolog, | | CTGCACTGACCTCTACATTTTGTAT (SEQ ID NO: 2606) |
| | | | Drosophila) | | ATGTTCAGAACTTCATCTGCCACTG (SEQ ID NO: 2607) |
| | | | | | ATCTGCCACTGGTTATTTTTTTCTA (SEQ ID NO: 2608) |
| | | | | | GAATTTTACTTGCACCTTATAGTTC (SEQ ID NO: 2609) |
| | | | | | TGCAGGAAACCCTTTTTGTAAGTCT (SEQ ID NO: 2610) |
| | | | | | TTTGCATTTTGTTTCACTCTTTCCA (SEQ ID NO: 2611) |
| | | | | | GATAAGCAGAGTTGCTCTTCACCAG (SEQ ID NO: 2612) |
| | | | | | TGCTCTTCACCAGTGTTTTTCTTCA (SEQ ID NO: 2613) |
| 205463_s_at | PDGFA | PDGF-A, PDGF1 | platelet-derived | 5154 | TACACCGATAACACACAGGCTGCTG (SEQ ID NO: 2614) |
| | | | growth factor alpha | | CAGGCTGCTGTAACTGTCAGGACAG (SEQ ID NO: 2615) |
| | | | polypeptide | | GACAGTGCGACGGTATTTTTCCTAG (SEQ ID NO: 2616) |
| | | | | | ATGGTATACCTACCTATGCATCATT (SEQ ID NO: 2617) |
| | | | | | AATGTTTCTGGCTTTGTGTTTCTCC (SEQ ID NO: 2618) |
| | | | | | ATGCGTCAACCAATCGTACGCCGTC (SEQ ID NO: 2619) |
| | | | | | CCCAGAGCCCGTTTGTGGCTGAGTG (SEQ ID NO: 2620) |
| | | | | | GTGGCTGAGTGACAACTTGTTCCCC (SEQ ID NO: 2621) |
| | | | | | CCCGCAGTGCACACCTAGAATGCTG (SEQ ID NO: 2622) |
| | | | | | GGCACGTGAGATGCATTGCCGCTTC (SEQ ID NO: 2623) |
| | | | | | GCTGCCAGTGTTTGGACAGAACCCA (SEQ ID NO: 2624) |
| 205353_s_at | PEBP1 | HCNP, PBP, | phosphatidylethanolamine | 5037 | TCACTCACTCTGATTTATGTTTTGA (SEQ ID NO: 2625) |
| | | PEBP, RKIP | binding protein 1 | | TTGGGGGGTATTTTGGTACTGTGAT (SEQ ID NO: 2626) |
| | | | | | ATTTTGGTACTGTGATGGGGTCATC (SEQ ID NO: 2627) |
| | | | | | AAGACCAGGTCTACAGTGATAGAGC (SEQ ID NO: 2628) |
| | | | | | GATCCTGAGTCCAGAATGGTACACA (SEQ ID NO: 2629) |
| | | | | | GTGATGTCACTCACCTAGACAACCA (SEQ ID NO: 2630) |
| | | | | | CTCACCTAGACAACCAGAGGCTGGC (SEQ ID NO: 2631) |
| | | | | | CCAGAGGCTGGCATTGAGGCTAACC (SEQ ID NO: 2632) |
| | | | | | GGCATTGAGGCTAACCTCCAACACA (SEQ ID NO: 2633) |
| | | | | | TAACCTCCAACACAGTGCATCTCAG (SEQ ID NO: 2634) |
| | | | | | TGCATCTCAGATGCCTCAGTAGGCA (SEQ ID NO: 2635) |
| 211941_s_at | PEBP1 | HCNP, PBP, | phosphatidylethanolamine | 5037 | CACAGTCCTCTCCGATTATGTGGGC (SEQ ID NO: 2636) |
| | | PEBP, RKIP | binding protein 1 | | CACCGCTATGTCTGGCTGGTTTACG (SEQ ID NO: 2637) |
| | | | | | GGCCGCTAAAGTGTGACGAGCCCAT (SEQ ID NO: 2638) |
| | | | | | CCATCCTCAGCAACCGATCTGGAGA (SEQ ID NO: 2639) |
| | | | | | CAAATTCAAGGTGGCGTCCTTCCGT (SEQ ID NO: 2640) |
| | | | | | CTGGCACGTGTTACCAGGCCGAGTG (SEQ ID NO: 2641) |
| | | | | | GGATGACTATGTGCCCAAACTGTAC (SEQ ID NO: 2642) |
| | | | | | TGGGGACCTGAACTGTCCTGGAGGC (SEQ ID NO: 2643) |
| | | | | | TTCCCCAGTTCAGTGTTGCATGTAT (SEQ ID NO: 2644) |
| | | | | | CCCCCCTTGGCATGGGTGAGACCTG (SEQ ID NO: 2645) |
| | | | | | CCTGCTGCCTGGCCTTTATAATTTT (SEQ ID NO: 2646) |
| 217923_at | PEF1 | PEF1A, PEFLIN | penta-EF-hand | 553115 | GGGGCTGAGGCCACACAGATAGGAG (SEQ ID NO: 2647) |
| | | | domain containing 1 | | GAATGTCCTGATGGCCATGAGCAGT (SEQ ID NO: 2648) |
| | | | | | CATGAGCAGTTGAGTGGCACAGCCT (SEQ ID NO: 2649) |
| | | | | | GGCACCAGGAGCAGGTCCTTGTAAT (SEQ ID NO: 2650) |
| | | | | | AGTTAGTGTCCAGTCAGCTGAGCTC (SEQ ID NO: 2651) |
| | | | | | CAGTGGTGAGTGTTCATCGGCCTGT (SEQ ID NO: 2652) |
| | | | | | ATCGGCCTGTTACCGTTAGTACCTG (SEQ ID NO: 2653) |
| | | | | | ACCAGGCCATCCTGTCAAACGAGCC (SEQ ID NO: 2654) |
| | | | | | GATCTGTCTATGGGACCAGTGGCTT (SEQ ID NO: 2655) |
| | | | | | TCTGCCACACCCATAAATCCTTGTG (SEQ ID NO: 2656) |
| | | | | | TTGTGTGTTAACTTCTAGCTGCCTG (SEQ ID NO: 2657) |
| 200634_at | PFN1 | | profilin 1 | 5216 | GAAAACGTTCGTCAACATCACGCCA (SEQ ID NO: 2658) |
| | | | | | ATCACGCCAGCTGAGGTGGGTGTCC (SEQ ID NO: 2659) |
| | | | | | TCCTGGTTGGCAAAGACCGGTCAAG (SEQ ID NO: 2660) |
| | | | | | GACCGGTCAAGTTTTTACGTGAATG (SEQ ID NO: 2661) |
| | | | | | AATGTTCGGTGATCCGGGACTCACT (SEQ ID NO: 2662) |
| | | | | | GAATTTAGCATGGATCTTCGTACCA (SEQ ID NO: 2663) |
| | | | | | TTCGTACCAAGAGCACCGGTGGGGC (SEQ ID NO: 2664) |
| | | | | | ACCTTCAATGTCACTGTCACCAAGA (SEQ ID NO: 2665) |
| | | | | | CTGACAAGACGCTAGTCCTGCTGAT (SEQ ID NO: 2666) |
| | | | | | GTGTCCACGGTGGTTTGATCAACAA (SEQ ID NO: 2667) |
| | | | | | CCCTTATTGCTGCCAAAACCACATG (SEQ ID NO: 2668) |
| 206726_at | PGDS | | prostaglandin D2 | 27306 | CTTACTCTTCACCAGAGCCTAGCAA (SEQ ID NO: 2669) |
| | | | synthase, | | TGAGCTGCTCACGTATAATGCGCCT (SEQ ID NO: 2670) |
| | | | hematopoietic | | GTAACTTGGGCAGACTTCTACTGGG (SEQ ID NO: 2671) |
| | | | | | GGAGATTTGCAGTACCACACTTTTG (SEQ ID NO: 2672) |
| | | | | | AGCCTGACCTGTTAGACAACCATCC (SEQ ID NO: 2673) |
| | | | | | CCATCCAAGGCTGGTGACTTTACGG (SEQ ID NO: 2674) |
| | | | | | TTCCTGCCGTCGCTAACTGGATAAA (SEQ ID NO: 2675) |
| | | | | | CAAACCAAACTCTAGCTGATCCATG (SEQ ID NO: 2676) |
| | | | | | GATCCATGTTGCCTTCAAGTTTGTT (SEQ ID NO: 2677) |
| | | | | | TCAGCCTGCCAGATAATCCACATGC (SEQ ID NO: 2678) |
| | | | | | CCCAGCTCCACTAAGATTTTCACTT (SEQ ID NO: 2679) |
| 215832_x_at | PICALM | CALM, CLTH, | phosphatidylinositol | 8301 | GAGAACCCGCTGGTTTATTGCGACG (SEQ ID NO: 2680) |
| | | LAP | binding clathrin | | CGCGGTGCATCAAGCTTGCTATGGC (SEQ ID NO: 2681) |
| | | | assembly protein | | ATGGCATTGTTCAAGTACCCACTGG (SEQ ID NO: 2682) |
| | | | | | GTACCCACTGGACCGTGGTTTTGCA (SEQ ID NO: 2683) |
| | | | | | GAGAGAGCAGCCAGAGTGGCACCCC (SEQ ID NO: 2684) |
| | | | | | CCTATCCTGCTACTACACCAACAGG (SEQ ID NO: 2685) |
| | | | | | GTGTTCCTGTAATGACGCAACCAAC (SEQ ID NO: 2686) |
| | | | | | CCCCTTTGGCCCTGTATCAGGAGCA (SEQ ID NO: 2687) |
| | | | | | AGCAGCAAAATCCTTACTTCCAGCA (SEQ ID NO: 2688) |
| | | | | | CAAACTGCTGTCTCTTAAATCTCTT (SEQ ID NO: 2689) |
| | | | | | AAACTCTCTTCTTCCATTAAAATGT (SEQ ID NO: 2690) |
| 205078_at | PIGF | MGC32646, | phosphatidylinositol | 5281 | TGTATCTACTTTCTTATGTCTTGTT (SEQ ID NO: 2691) |
| | | MGC33136 | glycan anchor | | TACTTTCTTATGTCTTGTTTCTCCT (SEQ ID NO: 2692) |
| | | | biosynthesis, class F | | ATTTTTGTTCTGTATGGAGCACCAC (SEQ ID NO: 2693) |
| | | | | | GGAGCACCACTGATAGAGTTGGCAT (SEQ ID NO: 2694) |
| | | | | | GTGCCTTGCTTATGTTTGTTAGGAC (SEQ ID NO: 2695) |
| | | | | | TTTGTTAGGACCAAACCTCAAAGCA (SEQ ID NO: 2696) |
| | | | | | GAGAATAGTCTCCAGATCACTACAA (SEQ ID NO: 2697) |
| | | | | | CAGATCACTACAATTTCTAGCTTTG (SEQ ID NO: 2698) |
| | | | | | AGGAGCATGGCTTGGAGCACTTCCT (SEQ ID NO: 2699) |
| | | | | | GCACTTCCTATTCCACTGGATTGGG (SEQ ID NO: 2700) |
| | | | | | AAGACCATGGCAGGTATGGCCCATC (SEQ ID NO: 2701) |
| 204213_at | PIGR | FLJ22667, | polymeric | 5284 | TTTGTTGCCACCACTGAGAGCACCA (SEQ ID NO: 2702) |
| | | MGC125361, | immunoglobulin | | CCCCCAGGAAGCCTAGACGGTGTCG (SEQ ID NO: 2703) |
| | | MGC125362 | receptor | | CACCCATGACAATCACCTTCAGAAT (SEQ ID NO: 2704) |
| | | | | | CAGAATCATGTCGATCCTGGGGGCC (SEQ ID NO: 2705) |
| | | | | | GCTCTAACACCTGCCTAGGTTTTTC (SEQ ID NO: 2706) |
| | | | | | TTCCTACTGTCCTCAGAGGCGTGCT (SEQ ID NO: 2707) |
| | | | | | TCAAAGCCTGGCCTAATTGTTCCTA (SEQ ID NO: 2708) |
| | | | | | CATGAGGAGGTCCCACTTGCAACTT (SEQ ID NO: 2709) |
| | | | | | GGTCCTCATGGGTCCCTTGAAGGAA (SEQ ID NO: 2710) |
| | | | | | AGAAAGGAGAGACGTGCAGCGCCCC (SEQ ID NO: 2711) |
| | | | | | CCCTCTGCACCCTTATCATGGGATG (SEQ ID NO: 2712) |
| 217770_at | PIGT | CGI-06, | phosphatidylinositol | 51604 | CAGCATGCCCTACAACGTGATCTGC (SEQ ID NO: 2713) |
| | | FLJ41596, | glycan anchor | | ACAACGTGATCTGCCTCACGTGCAC (SEQ ID NO: 2714) |
| | | MGC8909, NDAP | biosynthesis, class T | | ACTGTGGTGGCCGTGTGCTACGGCT (SEQ ID NO: 2715) |
| | | | | | TGGCCAAGCGGCTGGCCAACCTTAT (SEQ ID NO: 2716) |
| | | | | | CTCTCCTCAGAGTTGGCTTTTGAAC (SEQ ID NO: 2717) |
| | | | | | GGCTTTTGAACCAAAGTGCCCTGGA (SEQ ID NO: 2718) |
| | | | | | TCCAGTACAGGAGCCACGAGCCAAA (SEQ ID NO: 2719) |
| | | | | | CCTGTAGTGGCCACCTCTATATTGA (SEQ ID NO: 2720) |
| | | | | | AAAAGTGGTCGGTGGCTGCTGTATT (SEQ ID NO: 2721) |
| | | | | | AGAAAGGTCGGCTGGCAGCACTGGC (SEQ ID NO: 2722) |
| | | | | | GGTGATGGGGTGTGCTACACAGTGT (SEQ ID NO: 2723) |
| 217620_s_at | PIK3CB | DKFZp779K1237, | phosphoinositide-3- | 5291 | AAGCAGATGTTATGGAAGCAAGTTC (SEQ ID NO: 2724) |
| | | MGC133043, | kinase, catalytic, beta | | GGAAGCAAGTTCACAATTACCCAAT (SEQ ID NO: 2725) |
| | | PI3K, PI3KCB, | polypeptide | | ATTACCCAATGTTCAACCTCCTTAT (SEQ ID NO: 2726) |
| | | PI3Kbeta, | | | AATGTTCAACCTCCTTATGGATATT (SEQ ID NO: 2727) |
| | | PIK3C1, p110- | | | TGCATGTGTGAATCAGACTGCTGTA (SEQ ID NO: 2728) |
| | | BETA | | | CAGACTGCTGTATATGAGGAGCTTG (SEQ ID NO: 2729) |
| | | | | | GAAACACGAAGACTCTGTGATGTCA (SEQ ID NO: 2730) |
| | | | | | TGTGATGTCAGACCTTTTCTTCCAG (SEQ ID NO: 2731) |
| | | | | | TTCTTCCAGTTCTCAAATTAGTGAC (SEQ ID NO: 2732) |
| | | | | | GACAAGAAGTTGTGACCCAGGGGAA (SEQ ID NO: 2733) |
| | | | | | CTCAAAAATTGGAGTCCTTATAGGA (SEQ ID NO: 2734) |
| 207469_s_at | PIR | | pirin (iron-binding | 8544 | ACTCGCACACCAACCTTATATTTGG (SEQ ID NO: 2735) |
| | | | nuclear protein) | | GGACTTCAAATTGGACCCAGGAGCC (SEQ ID NO: 2736) |
| | | | | | GGACAAGCTTCATTTACACGATATC (SEQ ID NO: 2737) |
| | | | | | GGAGATGTGTATATTGGGCCCGATG (SEQ ID NO: 2738) |
| | | | | | ATTGGGCCCGATGATGCACAACAAA (SEQ ID NO: 2739) |
| | | | | | CTCATCACACAGCAGTGCTTGGAGA (SEQ ID NO: 2740) |
| | | | | | GAAGCCACTTTGTCTTAATTGCTGG (SEQ ID NO: 2741) |
| | | | | | GAGAACCAGTTATCCAACATGGTCC (SEQ ID NO: 2742) |
| | | | | | CGGAAGAGCAGGTCTTGATGTGTCC (SEQ ID NO: 2743) |
| | | | | | GAAGGCATTCCATTTCTAAAGCTTA (SEQ ID NO: 2744) |
| | | | | | GCTTCTAAAGAATTCCACACTAACG (SEQ ID NO: 2745) |
| 210183_x_at | PNN | DRS, SDK3, | pinin, desmosome | 5411 | GGCAAATCTTTAAGTCTGTTCCCTT (SEQ ID NO: 2746) |
| | | memA, pinin | associated protein | | TCTGTTCCCTTCTAATTCTGTATCA (SEQ ID NO: 2747) |
| | | | | | ACATTGCTTTTGGCGGCCGCGAATT (SEQ ID NO: 2748) |
| | | | | | GCTCGCCCGCCAGAAGAATATGAAA (SEQ ID NO: 2749) |
| | | | | | AAGCGCCGAGATGACGGGCTTTCTG (SEQ ID NO: 2750) |
| | | | | | CCGCCCGCAAGCAGAGGGACTCGGA (SEQ ID NO: 2751) |
| | | | | | GGGACTCGGAGATCATGCAGCAGAA (SEQ ID NO: 2752) |
| | | | | | GGAACCCAAGTAGCTTTGTGGCTTC (SEQ ID NO: 2753) |
| | | | | | TCCTCCTGTAGTGCTCACAGGTCCC (SEQ ID NO: 2754) |
| | | | | | CTTCCCAGTGTTTTTTATTCCTGTG (SEQ ID NO: 2755) |
| | | | | | TTATTCCTGTGGGGCTCACCCCAAA (SEQ ID NO: 2756) |
| 206789_s_at | POU2F1 | OCT1, OTF1 | POU class 2 | 5451 | GGTGGCTCTCTTCCAATAACATCAC (SEQ ID NO: 2757) |
| | | | homeobox 1 | | GCTCTCTTCCAATAACATCACTTGA (SEQ ID NO: 2758) |
| | | | | | CATCACTTGATGCAACTGGGAACCT (SEQ ID NO: 2759) |
| | | | | | GCAACTGGGAACCTGGTATTTGCCA (SEQ ID NO: 2760) |
| | | | | | TATTTGCCAATGCGGGAGGAGCCCC (SEQ ID NO: 2761) |
| | | | | | TGCAGGGAACTCTGCACCTGTAGCC (SEQ ID NO: 2762) |
| | | | | | GCCTCCAAGGCACAGTGAGCTGGGC (SEQ ID NO: 2763) |
| | | | | | GCCTTTTTCACTCTGCAGTGTGATT (SEQ ID NO: 2764) |
| | | | | | TGTGATTGGACTGCCAGCCAGGTTA (SEQ ID NO: 2765) |
| | | | | | TTCCTCTCGCCGTGTTGTGAGGGCA (SEQ ID NO: 2766) |
| | | | | | TGGAGACGGAACATTTGCCTAATTT (SEQ ID NO: 2767) |
| 218341_at | PPCS | RP11-163G10.1, | phosphopantothenoyl | 79717 | AAACCAAGTTATTGCTATCAAGGAA (SEQ ID NO: 2768) |
| | | FLJ11838, | cysteine synthetase | | TAATCTTCAGTCTCGACACACAGCT (SEQ ID NO: 2769) |
| | | MGC117357, | | | GTCTCGACACACAGCTTTTATAGGT (SEQ ID NO: 2770) |
| | | MGC138220 | | | AAATTGTTCAGGGCTCTTAGAGATG (SEQ ID NO: 2771) |
| | | | | | AAACCATGGCTTTCATATGGACAGA (SEQ ID NO: 2772) |
| | | | | | AAGGCAGTGGTGTGTAGGCAAATAT (SEQ ID NO: 2773) |
| | | | | | AAATATGGTTTGGCATTCGTCTTTT (SEQ ID NO: 2774) |
| | | | | | GGCATTCGTCTTTTAATGACACCTG (SEQ ID NO: 2775) |
| | | | | | TACATGGGGGCCTGAATGTCAGCCA (SEQ ID NO: 2776) |
| | | | | | GAATGGTCATGCTTTGGAGATCAAA (SEQ ID NO: 2777) |
| | | | | | TGAATGCCTATGTATGTCAGGCCCT (SEQ ID NO: 2778) |
| 204228_at | PPIH | CYP-20, CYPH, | peptidylprolyl | 10465 | ATGGAGATGGTACTGGAGTCGCCAG (SEQ ID NO: 2779) |
| | | MGC5016, | isomerase H | | TCGCCAGTATTTACCGGGGGCCATT (SEQ ID NO: 2780) |
| | | SnuCyp-20, | (cyclophilin H) | | TTTAAACTTAGACACTCAGCTCCAG (SEQ ID NO: 2781) |
| | | USA-CYP | | | GCTTTCCATGGCGAACAGTGGTCCA (SEQ ID NO: 2782) |
| | | | | | ATCACCTGCTCTAAGTGCGATTGGC (SEQ ID NO: 2783) |
| | | | | | AAAATCATCGATGGACTTCTAGTGA (SEQ ID NO: 2784) |
| | | | | | TTCCCACAGGCCCCAACAATAAGCC (SEQ ID NO: 2785) |
| | | | | | CTACCTGTGGTGATCTCGCAGTGTG (SEQ ID NO: 2786) |
| | | | | | AAAGACTGAATCAGGCCTTCCCTTC (SEQ ID NO: 2787) |
| | | | | | AGTAAGATAATCTGGACTGGCCCCC (SEQ ID NO: 2788) |
| | | | | | CTGCTGCCCCATTTGATCAAGAGAC (SEQ ID NO: 2789) |
| 218273_s_at | PPM2C | RP23-203A12.1, | protein phosphatase | 54704 | ATTGACTTTGCAGCAGGGTGGCAGG (SEQ ID NO: 2790) |
| | | Gm1024 | 2C, magnesium- | | GTCCTGCCTAGCTCAGATTTCATGG (SEQ ID NO: 2791) |
| | | | dependent, catalytic | | CAGATTTCATGGCACCTGCACTTGA (SEQ ID NO: 2792) |
| | | | subunit | | CACTTCTTTATCACAGGTGTCTTGA (SEQ ID NO: 2793) |
| | | | | | TAGCTTCTTTTACCAACCTGAGAAA (SEQ ID NO: 2794) |
| | | | | | GTATCTTGCTGTGTGTAGTCTCTTG (SEQ ID NO: 2795) |
| | | | | | TCACACCTTTCTTCACTGAGATTCC (SEQ ID NO: 2796) |
| | | | | | TCCAGTTCTTCAAGCCATAAATGAC (SEQ ID NO: 2797) |
| | | | | | GATTATTTGACTGGAATGCTTCTTA (SEQ ID NO: 2798) |
| | | | | | GAATAACTATACTCCGTTATCCACC (SEQ ID NO: 2799) |
| | | | | | TATCCACCCGATTTCCTAATGTAAT (SEQ ID NO: 2800) |
| 202313_at | PPP2R2A | B55-ALPHA, | protein phosphatase | 5520 | GTTTGACAGTGTGCCATTCGACAAC (SEQ ID NO: 2801) |
| | | B55A, FLJ26613, | 2 (formerly 2A), | | GATTCATCACTGTGGTGTTCTCCAT (SEQ ID NO: 2802) |
| | | MGC52248, | regulatory subunit B, | | CTCCATGTCTGCTAGCCATTTAGGT (SEQ ID NO: 2803) |
| | | PR52A, PR55A | alpha isoform | | CTTCTTGCACCATCTTGCCTAATGG (SEQ ID NO: 2804) |
| | | | | | AACATTGATTTACTCCACTTTTTAT (SEQ ID NO: 2805) |
| | | | | | TATGCCTTCCATTGTGATGACGTCA (SEQ ID NO: 2806) |
| | | | | | AAGCCTTCAGTCATGCTATGGGATT (SEQ ID NO: 2807) |
| | | | | | GTGTATCCTCATTACTGTATCATTT (SEQ ID NO: 2808) |
| | | | | | TGTATCATTTGTGGGGTACACCCCT (SEQ ID NO: 2809) |
| | | | | | TTACTGTGGCTTGTAGCATTCCTCC (SEQ ID NO: 2810) |
| | | | | | CTCCACCCGGTCTTGGTGGTGGTAT (SEQ ID NO: 2811) |
| 209817_at | PPP3CB | RP11-345K20.1, | protein phosphatase | 5532 | TAGAGTTAACTACCTGCTTAGGCCC (SEQ ID NO: 2812) |
| | | CALNA2, CALNB | 3 (formerly 2B), | | GCTTAGGCCCCAGAACATTACTTAT (SEQ ID NO: 2813) |
| | | | catalytic subunit, beta | | AGAACATTACTTATGCCCTTCAGTT (SEQ ID NO: 2814) |
| | | | isoform | | TGTGCAAGGTTTTGTACCCTGGTAA (SEQ ID NO: 2815) |
| | | | | | AGTTTGTTTTCTGTGGTGTTTGTCA (SEQ ID NO: 2816) |
| | | | | | AATTAACTGTCTGTAACATGCTGTT (SEQ ID NO: 2817) |
| | | | | | CTGTCTGTCTTTCTTTAGGTTAGCT (SEQ ID NO: 2818) |
| | | | | | ACACTTGTCTGTCTTGCAATGTAGA (SEQ ID NO: 2819) |
| | | | | | GAAGCAGCTTTGTAGCACCTTGTTT (SEQ ID NO: 2820) |
| | | | | | TGCTGCATTTGTTGCTGCACTTTGT (SEQ ID NO: 2821) |
| | | | | | GCACTTTGTGCATTCTGAACATGAA (SEQ ID NO: 2822) |
| 205277_at | PRDM2 | RP5-1177E19.1, | PR domain | 7799 | AATGGTGGTCATTGGCCGACATCAC (SEQ ID NO: 2823) |
| | | HUMHOXY1, | containing 2, with | | CCGACATCACAGTTTTCCTGTTTCC (SEQ ID NO: 2824) |
| | | KMT8, MTB-ZF, | ZNF domain | | CTACAGCTAACCCTCACAAGCATGA (SEQ ID NO: 2825) |
| | | RIZ, RIZ1, RIZ2 | | | AGCATGAAGTGCTGTGGCTGTTCCT (SEQ ID NO: 2826) |
| | | | | | GGCTGTTCCTTATCCTAATGATGCG (SEQ ID NO: 2827) |
| | | | | | CTAATGATGCGCTTTTGTCCCGTAA (SEQ ID NO: 2828) |
| | | | | | GCAAGGAAAGCTCACGAACCCCAAA (SEQ ID NO: 2829) |
| | | | | | CTGCAGCCCATGGTGAGCTCTGGGA (SEQ ID NO: 2830) |
| | | | | | GGTCACTCCTTTTTTGCATGTGCAA (SEQ ID NO: 2831) |
| | | | | | AAAGTGGCATTTCCTGGTCAGTGGT (SEQ ID NO: 2832) |
| | | | | | AAGACGACAGCTCTGTATCTGCCAT (SEQ ID NO: 2833) |
| 37022_at | PRELP | MGC45323, | proline/arginine-rich | 5549 | ACCGGATCTGCTCTGACCGCACTTG (SEQ ID NO: 2834) |
| | | MST161, | end leucine-rich | | GCTCTGACCGCACTTGAAGGCTGGG (SEQ ID NO: 2835) |
| | | MSTP161, | repeat protein | | TGTGCCGGCCATTCGTTTTCTCTCT (SEQ ID NO: 2836) |
| | | SLRR2A | | | TGCCGGCCATTCGTTTTCTCTCTCT (SEQ ID NO: 2837) |
| | | | | | CACCCTCGAGGCAGGGAAAAGCCAT (SEQ ID NO: 2838) |
| | | | | | CCAGTTGAAAGACACCCAGTGCACA (SEQ ID NO: 2839) |
| | | | | | ACATCTGGGCCGTGGACTATCTGAT (SEQ ID NO: 2840) |
| | | | | | CGTGGACTATCTGATCTTGGTCCTG (SEQ ID NO: 2841) |
| | | | | | CTATCTGATCTTGGTCCTGGCCGAG (SEQ ID NO: 2842) |
| | | | | | CAGCCCGGAGTAAGGTTCAGAAAGT (SEQ ID NO: 2843) |
| | | | | | CGAGAAACCCAGTTCTCCTGGGCCA (SEQ ID NO: 2844) |
| | | | | | TCCTGGGCCAAGGATCCCTTCTGGC (SEQ ID NO: 2845) |
| | | | | | TTCTGGCAAAGCTGCTGCTCCGCCG (SEQ ID NO: 2846) |
| | | | | | GCAAAGCTGCTGCTCCGCCGCTTGG (SEQ ID NO: 2847) |
| | | | | | CAAAGCTGCTGCTCCGCCGCTTGGT (SEQ ID NO: 2848) |
| | | | | | GTAAGGGCTCCCAGGTCTTCATCTG (SEQ ID NO: 2849) |
| 215194_at | PRKCA | AAG6, | protein kinase C, | 5578 | GGAGGGTACCAGATGACAGATTCAC (SEQ ID NO: 2850) |
| | | MGC129900, | alpha | | ACAGATTCACCCAACACTCATCTGA (SEQ ID NO: 2851) |
| | | MGC129901, | | | AACTGCTGGACCATGGTTGGGTTAG (SEQ ID NO: 2852) |
| | | PKC-alpha, | | | TGATTAGGTTTATCCCGGCCTTTCA (SEQ ID NO: 2853) |
| | | PKCA, PRKACA | | | CCCGGCCTTTCAGATTCTAGGGGCT (SEQ ID NO: 2854) |
| | | | | | GATTCTAGGGGCTGTTTCCATGGAG (SEQ ID NO: 2855) |
| | | | | | ATGGGGCAACAGTCTGCTTGCTTTC (SEQ ID NO: 2856) |
| | | | | | GAAGGGTTAACCTAGAGCCAGACGT (SEQ ID NO: 2857) |
| | | | | | GAGCCAGACGTAACTTCTACAGAAT (SEQ ID NO: 2858) |
| | | | | | AACTGGACACTGAGCATGACGTACC (SEQ ID NO: 2859) |
| | | | | | ATGACGTACCATCTTCCACTAAGAT (SEQ ID NO: 2860) |
| 209158_s_at | PSCD2 | ARNO, CTS18, | pleckstrin homology, | 9266 | GCCTCTACTACTTTGAGTACACCAC (SEQ ID NO: 2861) |
| | | CTS18.1, | Sec7 and coiled-coil | | GGACAAGGAGCCCCGAGGAATCATC (SEQ ID NO: 2862) |
| | | CYTH2, | domains 2 | | GAATCATCCCCCTGGAGAATCTGAG (SEQ ID NO: 2863) |
| | | PSCD2L, SEC7L, | (cytohesin-2) | | GAATCTGAGCATCCGAGAGGTGGAC (SEQ ID NO: 2864) |
| | | Sec7p-L, Sec7p- | | | CTGCTTTGAACTTTACATCCCCAAC (SEQ ID NO: 2865) |
| | | like | | | ACAAGGGGCAGCTCATCAAAGCCTG (SEQ ID NO: 2866) |
| | | | | | GAGGGAAACCACATGGTGTACCGGA (SEQ ID NO: 2867) |
| | | | | | GAGTGGATCAAGTCCATCCAGGCGG (SEQ ID NO: 2868) |
| | | | | | TCCATCCAGGCGGCTGTGAGTGTGG (SEQ ID NO: 2869) |
| | | | | | CCATTATTTATTACGGAGCTGCCCC (SEQ ID NO: 2870) |
| | | | | | AACACGCTGTTGGTAATCTTATTAA (SEQ ID NO: 2871) |
| 203396_at | PSMA4 | HC9, HsT17706, | proteasome | 5685 | GGCTTTCAGCTCTATCAGAGTGACC (SEQ ID NO: 2872) |
| | | MGC111191, | (prosome, | | AGAGTGACCCTAGTGGAAATTACGG (SEQ ID NO: 2873) |
| | | MGC12467, | macropain) subunit, | | GGGGGATGGAAGGCCACATGCATTG (SEQ ID NO: 2874) |
| | | MGC24813, | alpha type, 4 | | GAAATAATAGCGCTGCAGCTGTGTC (SEQ ID NO: 2875) |
| | | PSC9 | | | GCGCTGCAGCTGTGTCAATGTTGAA (SEQ ID NO: 2876) |
| | | | | | GAAATGACCTTGAAGTCAGCACTTG (SEQ ID NO: 2877) |
| | | | | | CATGGATGTTAGTAAACTCTCTGCT (SEQ ID NO: 2878) |
| | | | | | AAGACAGTAATCAGAGTTCTCAAAC (SEQ ID NO: 2879) |
| | | | | | TACTGAATTGGGTCCTTGTCATTTC (SEQ ID NO: 2880) |
| | | | | | GTCCTTGTCATTTCTGTCCAATTGA (SEQ ID NO: 2881) |
| | | | | | TACCCTTCATGGACGTCTTAATCTT (SEQ ID NO: 2882) |
| 201274_at | PSMA5 | MGC117302, | proteasome | 5686 | CAAGCTGTGTCCAATCTGGCTTTGC (SEQ ID NO: 2883) |
| | | MGC125802, | (prosome, | | ATGTCTCGTCCCTTTGGAGTAGCAT (SEQ ID NO: 2884) |
| | | MGC125803, | macropain) subunit, | | AAAGGACCCCAGCTGTTTCATATGG (SEQ ID NO: 2885) |
| | | MGC125804, | alpha type, 5 | | TGGACCCATCTGGGACCTTTGTACA (SEQ ID NO: 2886) |
| | | PSC5, ZETA | | | GCTCGAGCAATTGGCTCTGCTTCAG (SEQ ID NO: 2887) |
| | | | | | CTGCTTCAGAGGGTGCCCAGAGCTC (SEQ ID NO: 2888) |
| | | | | | GAGCTCCTTGCAAGAACTTTACCAC (SEQ ID NO: 2889) |
| | | | | | GAAGCCATCAAGTCTTCACTCATCA (SEQ ID NO: 2890) |
| | | | | | ATTGAGCTAGCCACAGTGCAGCCTG (SEQ ID NO: 2891) |
| | | | | | AGGAATCCTGATCCTCAGAACTTCT (SEQ ID NO: 2892) |
| | | | | | TAAATTTTATTTCCAGCTCCTGTTC (SEQ ID NO: 2893) |
| 201114_x_at | PSMA7 | RP5-1005F21.4, | proteasome | 5688 | CCAGAGCCACCGGCTGACTGTAGAG (SEQ ID NO: 2894) |
| | | C6, HSPC, | (prosome, | | GGACCCGGTCACTGTGGAGTACATC (SEQ ID NO: 2895) |
| | | MGC3755, RC6- | macropain) subunit, | | CGCTACATCGCCAGTCTGAAGCAGC (SEQ ID NO: 2896) |
| | | 1, XAPC7 | alpha type, 7 | | CAGAGCAATGGGCGCAGGCCGTTTG (SEQ ID NO: 2897) |
| | | | | | CCCTCATCGTGGGTTTCGACTTTGA (SEQ ID NO: 2898) |
| | | | | | TTCGACTTTGATGGCACTCCTAGGC (SEQ ID NO: 2899) |
| | | | | | GGGCACATACCATGCCTGGAAGGCC (SEQ ID NO: 2900) |
| | | | | | ATAGGCCGGGGTGCCAAGTCAGTGC (SEQ ID NO: 2901) |
| | | | | | AAGCTGGTGATCAAGGCACTCCTGG (SEQ ID NO: 2902) |
| | | | | | GAACTTGCTGTCATGAGGCGAGATC (SEQ ID NO: 2903) |
| | | | | | ATGAGTCTCGATGTGTAGGCCTTTC (SEQ ID NO: 2904) |
| 200039_s_at | PSMB2 | RP23-120H2.2, | proteasome | 5690 | TAACTTCACACGCCGAAACCTGGCT (SEQ ID NO: 2905) |
| | | AU045357, | (prosome, | | CGAAACCTGGCTGACTGTCTTCGGA (SEQ ID NO: 2906) |
| | | AW108089, C7-I, | macropain) subunit, | | GGGCCAGCGCTGTATTACATGGACT (SEQ ID NO: 2907) |
| | | D4Wsu33e | beta type, 2 | | ACTCTCAGTATCCTCGACCGATACT (SEQ ID NO: 2908) |
| | | | | | TACACACCGACTATCTCACGTGAGA (SEQ ID NO: 2909) |
| | | | | | GTGAGAGGGCAGTGGAACTCCTTAG (SEQ ID NO: 2910) |
| | | | | | GCTCCAGAAACGCTTCATCCTGAAT (SEQ ID NO: 2911) |
| | | | | | TGAATCTGCCAACCTTCAGTGTTCG (SEQ ID NO: 2912) |
| | | | | | TGACCTGGATAACATTTCCTTCCCC (SEQ ID NO: 2913) |
| | | | | | AACAGGGCTCCTAACATCATGTCCT (SEQ ID NO: 2914) |
| | | | | | TCTTTTCAGGCGCACTCTTGATAAA (SEQ ID NO: 2915) |
| 201388_at | PSMD3 | P58, RPN3, S3 | proteasome | 5709 | GATATCCACAACATGTCTGTCAAGG (SEQ ID NO: 2916) |
| | | | (prosome, | | TCTGTCAAGGCCATGAGGTTTCCTC (SEQ ID NO: 2917) |
| | | | macropain) 26S | | GTTTCCTCCCAAATCGTACAACAAG (SEQ ID NO: 2918) |
| | | | subunit, non-ATPase, 3 | | GGAACGGCGTGAGCGAGAACAGCAG (SEQ ID NO: 2919) |
| | | | | | GAACAGCAGGACTTGGAGTTTGCCA (SEQ ID NO: 2920) |
| | | | | | TTTCCCACACACAGCTCATATGCTG (SEQ ID NO: 2921) |
| | | | | | ACAGCTCATATGCTGCATTCGTGCA (SEQ ID NO: 2922) |
| | | | | | TGCTGCATTCGTGCAGGGGGTGGGG (SEQ ID NO: 2923) |
| | | | | | CCCAGCCGGTGACTTACTGTACAGC (SEQ ID NO: 2924) |
| | | | | | GATAGTTCTGTGTACTCCTTTAGGG (SEQ ID NO: 2925) |
| | | | | | TTAGGGAGTGGGGGACTAGAACTGG (SEQ ID NO: 2926) |
| 207805_s_at | PSMD9 | MGC8644, Rpn4, | proteasome | 5715 | TGTGGAGTTCGGCTCTGTGAACACC (SEQ ID NO: 2927) |
| | | p27 | (prosome, | | CCCAGAACTTCCAGTCACTGCATAA (SEQ ID NO: 2928) |
| | | | macropain) 26S | | GAATGTGACAGTGATCCGCAGGGGG (SEQ ID NO: 2929) |
| | | | subunit, non-ATPase, 9 | | CCAGCTTAGACTTGTTCCAACACGC (SEQ ID NO: 2930) |
| | | | | | AAAAGGACTGCTGGGCTGCAACATT (SEQ ID NO: 2931) |
| | | | | | GGGTCTAGGGATTTCCAACTTGTCT (SEQ ID NO: 2932) |
| | | | | | AGAGGCTTGTAACCTGAACTTCTGT (SEQ ID NO: 2933) |
| | | | | | GTGTGGTGGCAGTACTGTGGCCCAC (SEQ ID NO: 2934) |
| | | | | | CCCACCAGTGTAATCTCCCTGGATT (SEQ ID NO: 2935) |
| | | | | | TCTTTCACAAATTAGGCCACGGCCC (SEQ ID NO: 2936) |
| | | | | | GTGGGCGGAAGTTATTCTGGCAGGT (SEQ ID NO: 2937) |
| 218371_s_at | PSPC1 | RP11-523H24.2, | paraspeckle | 55269 | ATGTGGCTGAAGTTACCCGAAGTTC (SEQ ID NO: 2938) |
| | | DKFZp566B1447, | component 1 | | GTTACCCGAAGTTCAGCTTGCAGTG (SEQ ID NO: 2939) |
| | | FLJ10955, | | | AGTTCAGCTTGCAGTGTAATTCAGA (SEQ ID NO: 2940) |
| | | PSP1 | | | GAATCATACTTCCTTTCAGGTCAAA (SEQ ID NO: 2941) |
| | | | | | GTGGGAAATATCCTGTTCGTGACCT (SEQ ID NO: 2942) |
| | | | | | TCCTGTTCGTGACCTAGGAGAAACA (SEQ ID NO: 2943) |
| | | | | | TTCTTACTCCATACAAGCAGTTTAT (SEQ ID NO: 2944) |
| | | | | | AAACATGCTACAGGGGCACATTTTC (SEQ ID NO: 2945) |
| | | | | | ACAGGGGCACATTTTCTGTGGTTAA (SEQ ID NO: 2946) |
| | | | | | GCAGTTTTCCTTTGCATTGAGGGTT (SEQ ID NO: 2947) |
| | | | | | CTTTGCATTGAGGGTTTTGGCTTTT (SEQ ID NO: 2948) |
| 210832_x_at | PTGER3 | EP3, EP3-I, EP3- | prostaglandin E | 5733 | GTCTCCGCTCCTGATAATGATGTTG (SEQ ID NO: 2949) |
| | | II, EP3-III, EP3- | receptor 3 (subtype | | ACTTCTTCTTAATAGCTGTTCGCCT (SEQ ID NO: 2950) |
| | | IV, EP3e, | EP3) | | TTCGCCTGGCTTCACTGAACCAGAT (SEQ ID NO: 2951) |
| | | MGC141828, | | | TCTTGGATCCTTGGGTTTACCTGCT (SEQ ID NO: 2952) |
| | | MGC141829, | | | GTTTTGCCAGATCAGGTACCACACA (SEQ ID NO: 2953) |
| | | MGC27302 | | | ACAAACAACTATGCATCCAGCTCCA (SEQ ID NO: 2954) |
| | | | | | CCAGTGTTCCTCAACCTTGATGTGG (SEQ ID NO: 2955) |
| | | | | | TAAAACCTGCCTTTCTGCCAGGATC (SEQ ID NO: 2956) |
| | | | | | GGATCACATCACTGGAAGCTCCATG (SEQ ID NO: 2957) |
| | | | | | GCTCCATGACTCTCTTTTTGTAAAA (SEQ ID NO: 2958) |
| | | | | | TCCCAAACTATTCTCTTTTACTTCT (SEQ ID NO: 2959) |
| 211756_at | PTHLH | HHM, | parathyroid hormone- | 5744 | AAAACTTCACATTTATGTGGCTTGT (SEQ ID NO: 2960) |
| | | MGC14611, PLP, | like hormone | | TGTGGCTTGTTTATCCTTAGCTCAC (SEQ ID NO: 2961) |
| | | PTHR, PTHRP | | | TGTTTATCCTTAGCTCACAGATTGA (SEQ ID NO: 2962) |
| | | | | | GGTAATAATGACACTCCTAGACTTT (SEQ ID NO: 2963) |
| | | | | | GACACTCCTAGACTTTGGGATCAAA (SEQ ID NO: 2964) |
| | | | | | TAACTTAGGGCCAAGTCTTGGGTCT (SEQ ID NO: 2965) |
| | | | | | GTTCACAACCTAGGGCAAGTTACTC (SEQ ID NO: 2966) |
| | | | | | AAGTTACTCTGCCTTTCTAAGACTC (SEQ ID NO: 2967) |
| | | | | | CTAAGACTCACTTACATCTTCTGTG (SEQ ID NO: 2968) |
| | | | | | TAATTGTACCAACCTCATAGAGTTT (SEQ ID NO: 2969) |
| | | | | | ATGTGGACTAAATATCTGTCATATA (SEQ ID NO: 2970) |
| 202990_at | PYGL | GSD6 | phosphorylase, | 5836 | AGAGCAGATTTCCACTGCAGGCACC (SEQ ID NO: 2971) |
| | | | glycogen; liver (Hers | | GTTCATGCTAAATGGGGCCCTAACT (SEQ ID NO: 2972) |
| | | | disease, glycogen | | GGCCCTAACTATCGGGACCATGGAT (SEQ ID NO: 2973) |
| | | | storage disease type | | AGAGAACCTGTTCATCTTTGGCATG (SEQ ID NO: 2974) |
| | | | VI) | | GGATAGATGATGTGGCTGCTTTGGA (SEQ ID NO: 2975) |
| | | | | | GCAGCCTGACCTCTTCAAAGATATC (SEQ ID NO: 2976) |
| | | | | | GTCTTTGCAGACTACGAAGCCTATG (SEQ ID NO: 2977) |
| | | | | | AAGGCCTGGAACACAATGGTACTCA (SEQ ID NO: 2978) |
| | | | | | GGTACTCAAAAACATAGCTGCCTCG (SEQ ID NO: 2979) |
| | | | | | ATAGCTGCCTCGGGGAAATTCTCCA (SEQ ID NO: 2980) |
| | | | | | GGAACGTGGAACCTTCAGATCTAAA (SEQ ID NO: 2981) |
| 212866_at | R3HCC1 | DKFZp564N123 | R3H domain and | 203069 | GACCTTGCCCACGTGGTAGAGATCT (SEQ ID NO: 2982) |
| | | | coiled-coil containing 1 | | GATCTATGACTTTGAACCAGCGCTC (SEQ ID NO: 2983) |
| | | | | | CCAGCGCTCAAGACGGAGGACCTGC (SEQ ID NO: 2984) |
| | | | | | GCTGGCAACGTTTTCTGAGTTCCAA (SEQ ID NO: 2985) |
| | | | | | GGGGTTCAGGATTCAGTGGGTGGAT (SEQ ID NO: 2986) |
| | | | | | GTGGGTGGATGATACTCACGCACTC (SEQ ID NO: 2987) |
| | | | | | GCAGTCAAAGCTCAAAGCCTTGCAG (SEQ ID NO: 2988) |
| | | | | | TGCAGAGGCCAAAACTCCTGCGTCT (SEQ ID NO: 2989) |
| | | | | | AAAGAAAGAGCGGCCTGCTGTCCGG (SEQ ID NO: 2990) |
| | | | | | CAACACCATAAGCCTTCACAGACGC (SEQ ID NO: 2991) |
| | | | | | CACCCTCGAGCTTCACCATGGGGTG (SEQ ID NO: 2992) |
| 221792_at | RAB6B | | RAB6B, member | 51560 | ACACTAGGTTCTTCCCAGCATATGA (SEQ ID NO: 2993) |
| | | | RAS oncogene family | | AGTCCCCAAGTCTACTCTGATTGAT (SEQ ID NO: 2994) |
| | | | | | TGATTGATTGTCATGGGCACCCACA (SEQ ID NO: 2995) |
| | | | | | AATGTGCAAACTCCTTGGACTCCAG (SEQ ID NO: 2996) |
| | | | | | TCCAGACCCCTGTCTGGTTGGCACT (SEQ ID NO: 2997) |
| | | | | | GCACTCCCAGCAGTGTGTGGTTTCA (SEQ ID NO: 2998) |
| | | | | | AGGTGGGAAGCCTCCATAGCATTGA (SEQ ID NO: 2999) |
| | | | | | AGCATTGAAGGCCAGCCTGCATCTC (SEQ ID NO: 3000) |
| | | | | | CACCCATCCCTTTAAAGTGATTGGC (SEQ ID NO: 3001) |
| | | | | | GAGGGTGGCAATTCCATCTGTTATG (SEQ ID NO: 3002) |
| | | | | | GACATAGCCGCCATGTTGATTTCAC (SEQ ID NO: 3003) |
| 204478_s_at | RABIF | MSS4, | RAB interacting | 5877 | TGTGGCCTTGGAACGAGTTTCCCAT (SEQ ID NO: 3004) |
| | | RASGFR3, | factor | | TCTCCAAAGATAAACCTACTCCCCA (SEQ ID NO: 3005) |
| | | RASGRF3 | | | TCCCCACAAGAACTGGCCTTTAATG (SEQ ID NO: 3006) |
| | | | | | AATGTGGTATAACTGTTCCGCTGCC (SEQ ID NO: 3007) |
| | | | | | ACTGAGTACCAGCATGTCCATTTGA (SEQ ID NO: 3008) |
| | | | | | CCTCCTGCTTAGTTCACTTTGTATC (SEQ ID NO: 3009) |
| | | | | | TCCCCCAGTTTTGGGACACTGTGCT (SEQ ID NO: 3010) |
| | | | | | ACACTGTGCTTACCTCCAAAAATCT (SEQ ID NO: 3011) |
| | | | | | TCCAAAAATCTCATCTCTTCCCTGG (SEQ ID NO: 3012) |
| | | | | | GAGTGACTTTGTTGTATGGCTACCC (SEQ ID NO: 3013) |
| | | | | | TATGGCTACCCTTGTGATCTACAGT (SEQ ID NO: 3014) |
| 205326_at | RAMP3 | | receptor (G protein- | 10268 | TCTGCCTGCAGGTTTCTATGCTGTT (SEQ ID NO: 3015) |
| | | | coupled) activity | | TCTTAGCACAGAATCCAGCCTAGCC (SEQ ID NO: 3016) |
| | | | modifying protein 3 | | CCTAGCCTTAGCCGCAGTCTAGGCC (SEQ ID NO: 3017) |
| | | | | | TCTAGGCCCTGCTTGGACTAGGACT (SEQ ID NO: 3018) |
| | | | | | TTGGACTAGGACTCCTTGCTTGACC (SEQ ID NO: 3019) |
| | | | | | GGCTCTTGGAAGACGTTCCGTGCTG (SEQ ID NO: 3020) |
| | | | | | GCAGAGTCCATTCCATCATGATGCT (SEQ ID NO: 3021) |
| | | | | | CATGATGCTGTGCCCGCTATGGGCT (SEQ ID NO: 3022) |
| | | | | | TGCCCGCTATGGGCTGTGTCCATGA (SEQ ID NO: 3023) |
| | | | | | GTGGGGGTGTGTTATAGCCCCTCAC (SEQ ID NO: 3024) |
| | | | | | CCCTCTGGAATGGCATCCCATGAGC (SEQ ID NO: 3025) |
| 202033_s_at | RB1CC1 | CC1, | RB1-inducible coiled- | 9821 | TGATTTGTCCTGCAGTGCTCATTCA (SEQ ID NO: 3026) |
| | | DRAGOU14, | coil 1 | | AACAGCAGGCCATCTTTTTATGCAA (SEQ ID NO: 3027) |
| | | FIP200 | | | ACTTCACTGGTGTACATCGTTTACT (SEQ ID NO: 3028) |
| | | | | | TCGTTTACTTTTTAACTGGCTTCAT (SEQ ID NO: 3029) |
| | | | | | AGAAATGCGGACCAAACTACTTCAT (SEQ ID NO: 3030) |
| | | | | | ACTACTTCATTTTCTCAAAGGGCAT (SEQ ID NO: 3031) |
| | | | | | GCATACCTTGTGCATTGTGGCTTAT (SEQ ID NO: 3032) |
| | | | | | GATGAGCCATATTAATTGCCTGTTA (SEQ ID NO: 3033) |
| | | | | | GTTATTATTACCAGCATTTGTCCTT (SEQ ID NO: 3034) |
| | | | | | ATACTTGCACTCTTTAACACATTCT (SEQ ID NO: 3035) |
| | | | | | AGAGGAGTGTTATTGCATGCTGATA (SEQ ID NO: 3036) |
| 216215_s_at | RBM9 | FOX2, Fox-2, | RNA binding motif | 23543 | ACATGCAACATGCTGTTCCTCCAGC (SEQ ID NO: 3037) |
| | | HNRBP2, | protein 9 | | GTACCTTTGGGGCATGGGGGCATTA (SEQ ID NO: 3038) |
| | | HRNBP2, RTA, | | | GGGATGCTTGTGTAATCGACCACCT (SEQ ID NO: 3039) |
| | | dJ106I20.3, fxh | | | TCCAGAGAAGCATCCCAGGGCTTTG (SEQ ID NO: 3040) |
| | | | | | GGCTTTGTGACAGTCTCTAATTCCC (SEQ ID NO: 3041) |
| | | | | | TCCCTTCCCTTCTCGTTAAGAATCA (SEQ ID NO: 3042) |
| | | | | | GTATTCATTGGGTTACTCCTATTAT (SEQ ID NO: 3043) |
| | | | | | AGATCTTTAGCTTTTATTCCTTATT (SEQ ID NO: 3044) |
| | | | | | TTATTGATCATGTTGCTGGCTTTTA (SEQ ID NO: 3045) |
| | | | | | GCGAAGGAGGAGCACTGCCTCAGCC (SEQ ID NO: 3046) |
| | | | | | GCCTCAGCCTTTGCACATGGTAATG (SEQ ID NO: 3047) |
| 210568_s_at | RECQL | RECQL1, RecQ1 | RecQ protein-like | 5965 | AACAGAGTACTGCAGAGATCTAATC (SEQ ID NO: 3048) |
| | | | (DNA helicase Q1- | | AAAACTCACTCCATTGAAACTGATT (SEQ ID NO: 3049) |
| | | | like) | | GAAACTGATTGATTCTTGGATGGGA (SEQ ID NO: 3050) |
| | | | | | GGATGGGAAAGGGTGCAGCAAAACT (SEQ ID NO: 3051) |
| | | | | | TCCCACACTTCCTCGTGAAGATCTG (SEQ ID NO: 3052) |
| | | | | | GGAGAAGATTATTGCACACTTTCTA (SEQ ID NO: 3053) |
| | | | | | AGAACTCTTTCAGGGCTGAATCGTC (SEQ ID NO: 3054) |
| | | | | | AGGGCTGAATCGTCTCAAACTTGTC (SEQ ID NO: 3055) |
| | | | | | TCGTCTCAAACTTGTCATTCTGAAC (SEQ ID NO: 3056) |
| | | | | | CCAGAAGAAGGCTGCAAACATGCTT (SEQ ID NO: 3057) |
| | | | | | GATGATGCCTGATATGAATGTTACT (SEQ ID NO: 3058) |
| 218767_at | REXO4 | RP11-244N20.5, | REX4, RNA | 57109 | CATCTTCGGTGACACCCTGGGGTGA (SEQ ID NO: 3059) |
| | | REX4, XPMC2, | exonuclease 4 | | TCTCGAGGAGCCACATTTTCCTCCT (SEQ ID NO: 3060) |
| | | XPMC2H | homolog (S. cerevisiae) | | GGACCCAGACCAGGTGTCTGCAGTC (SEQ ID NO: 3061) |
| | | | | | ACATCAGGGGTTTCCTGTGGCCGTT (SEQ ID NO: 3062) |
| | | | | | GTTGGCTGGTGGGTCACCCAGCAGA (SEQ ID NO: 3063) |
| | | | | | GACTGCGGTTATTCCTGGAGGTCGG (SEQ ID NO: 3064) |
| | | | | | GGAGGTCGGCAGACATGCCAACCTT (SEQ ID NO: 3065) |
| | | | | | ATGCCAACCTTGGGCTATTTGAGCT (SEQ ID NO: 3066) |
| | | | | | TGTGATGCTAGCCGGTGGCTTTCTG (SEQ ID NO: 3067) |
| | | | | | GTTTGAGGCTCCCCTGGGAACTAGA (SEQ ID NO: 3068) |
| | | | | | CAAGGCGTTATTGGGCCACCTGACA (SEQ ID NO: 3069) |
| 208021_s_at | RFC1 | A1, MGC51786, | replication factor C | 5981 | TTGACCACGTCTCTGCTGTGAATAG (SEQ ID NO: 3070) |
| | | MHCBFB, PO- | (activator 1) 1, | | CTCAGACATTCTTATCCTTCTGGAG (SEQ ID NO: 3071) |
| | | GA, RECC1, | 145 kDa | | TCTTATCCTTCTGGAGTCTCAACCC (SEQ ID NO: 3072) |
| | | RFC, RFC140 | | | GAGTCTCAACCCATCAGGTTCAGAC (SEQ ID NO: 3073) |
| | | | | | AACCCATCAGGTTCAGACCAGTAGG (SEQ ID NO: 3074) |
| | | | | | GACCAGTAGGAACCAGGCTGGGTCA (SEQ ID NO: 3075) |
| | | | | | CAGGCTGGGTCAGGCTCTTAATTTC (SEQ ID NO: 3076) |
| | | | | | AGGCTCTTAATTTCACTACGGTGGG (SEQ ID NO: 3077) |
| | | | | | AAATGCTCAGAGGTCTGTGCTACCT (SEQ ID NO: 3078) |
| | | | | | TAAGGATCGTATTCCCTGCTTTAAG (SEQ ID NO: 3079) |
| | | | | | TGGTAGTCTTGTTTGGGTGATGAGA (SEQ ID NO: 3080) |
| 204336_s_at | RGS19 | GAIP, RGSGAIP | regulator of G-protein | 10287 | CAGTGGGGAGTGCTGTGTCTCCTGG (SEQ ID NO: 3081) |
| | | | signaling 19 | | GCCAAGCAGGAACTCCAGGTGCAGG (SEQ ID NO: 3082) |
| | | | | | TGGGGGCTCTTGCGTGGTGAGAGTA (SEQ ID NO: 3083) |
| | | | | | TGCGTGGTGAGAGTAGGGGTCCCCC (SEQ ID NO: 3084) |
| | | | | | TTGGTGGGGAACAGAACCTCCGCAT (SEQ ID NO: 3085) |
| | | | | | ACCTCCGCATCGTGTAGTTTTGTGA (SEQ ID NO: 3086) |
| | | | | | TACTTGAGCTGTCTGTACCCCAGAA (SEQ ID NO: 3087) |
| | | | | | TGTACCCCAGAATCAAACACAGAAC (SEQ ID NO: 3088) |
| | | | | | CTCAGAATCCTGCACTCAAGGTGGC (SEQ ID NO: 3089) |
| | | | | | TAAACCTGGAAACATGTCCTTACTA (SEQ ID NO: 3090) |
| | | | | | ACATGTCCTTACTAGGTGTTTTATC (SEQ ID NO: 3091) |
| 214811_at | RIMBP2 | KIAA0318, | RIMS binding protein 2 | 23504 | TGGTAAAGCACCAGTACTCCAACCT (SEQ ID NO: 3092) |
| | | MGC15831, | | | CTCCAACCTTCCAGAAAGCCGATTA (SEQ ID NO: 3093) |
| | | RBP2, RIM-BP2 | | | AGCCGATTATCTTCATTGCTTTTAA (SEQ ID NO: 3094) |
| | | | | | CTGTGGCATATGGTTTTCTGTTACT (SEQ ID NO: 3095) |
| | | | | | TTTCGTTGTCAAAATGCCATACCCA (SEQ ID NO: 3096) |
| | | | | | TCCACATAATGCATAAGCCACACCA (SEQ ID NO: 3097) |
| | | | | | GCCACACCAAAACCAGACTCAATTT (SEQ ID NO: 3098) |
| | | | | | CCAAATGAGTCCATACCCATCTTCA (SEQ ID NO: 3099) |
| | | | | | TTTTGTAATTCTTGTCCACTTGTAA (SEQ ID NO: 3100) |
| | | | | | CATACTTTTCAGACTGCCTTTCTTT (SEQ ID NO: 3101) |
| | | | | | ATCCATGTGTGGTTAAGCTCTGTGT (SEQ ID NO: 3102) |
| 212479_s_at | RMND5A | CTLH, FLJ12753, | required for meiotic | 64795 | AATACACCAGCAGTTGTCATTCAAT (SEQ ID NO: 3103) |
| | | FLJ13910, | nuclear division 5 | | ATGCAGGTTTTTGTACTTAATTATA (SEQ ID NO: 3104) |
| | | FLJ21795, | homolog A (S. cerevisiae) | | GCAGAAACGGAAATTGACCTCCCCG (SEQ ID NO: 3105) |
| | | MGC78451, | | | CTCCCCGCCATGTGTTTAATATTCC (SEQ ID NO: 3106) |
| | | RMD5, p44CTLH | | | CCATGTGTTTAATATTCCTCCTGCT (SEQ ID NO: 3107) |
| | | | | | ATCGTAAGCCTTGAGAGTGTTTGTG (SEQ ID NO: 3108) |
| | | | | | GATAGATTCCAGATATGCTTTTTGA (SEQ ID NO: 3109) |
| | | | | | GCACACCTGCATTTTAGCTCTGCAT (SEQ ID NO: 3110) |
| | | | | | GCAGGCTGCGTGTTTAAGAATTTCA (SEQ ID NO: 3111) |
| | | | | | CTGGCTGGTGTGAGAAGTCTTCCGT (SEQ ID NO: 3112) |
| | | | | | GAAGTCTTCCGTTAGCATAGAGTGG (SEQ ID NO: 3113) |
| 212696_s_at | RNF4 | RES4-26, | ring finger protein 4 | 6047 | CTGAAGGAGTGTCCCTCCTCTATGT (SEQ ID NO: 3114) |
| | | SNURF | | | GAAGAGGGCAGAATCCGCAGCTCTC (SEQ ID NO: 3115) |
| | | | | | TGTGATGTGTAGCATGTCTGCCCTC (SEQ ID NO: 3116) |
| | | | | | CCCTCTGACTGGACATCATTGCCAT (SEQ ID NO: 3117) |
| | | | | | CATCATTGCCATTAACTTTCTTCTG (SEQ ID NO: 3118) |
| | | | | | TTTCTTCTGGGCATCACGGCAATGT (SEQ ID NO: 3119) |
| | | | | | GTCACGATGCCCAGACTTGGAGCAA (SEQ ID NO: 3120) |
| | | | | | AGGCAACCTTGGAGTCAGTCCACTC (SEQ ID NO: 3121) |
| | | | | | ATGTACATAGTTCAACTCTTTCTTT (SEQ ID NO: 3122) |
| | | | | | TATCCATGGATATCAGTCTGCTTTG (SEQ ID NO: 3123) |
| | | | | | GACTCCTCTGCTAGTGTTACAGATG (SEQ ID NO: 3124) |
| 222279_at | RP3- | FLJ35429 | hypothetical protein | 285830 | AAATCTTAATCTGGACCCTTTTCAT (SEQ ID NO: 3125) |
| | 377H14.5 | | FLJ35429 | | GGACCCTTTTCATAAGATGGTGCCA (SEQ ID NO: 3126) |
| | | | | | AAAACAAGATCCACATGTCACCCAC (SEQ ID NO: 3127) |
| | | | | | TCCGGAGGCAGCCCAAATATCCTTG (SEQ ID NO: 3128) |
| | | | | | GAGAAATAAGCTTGACCACCATGTT (SEQ ID NO: 3129) |
| | | | | | ACCACCATGTTATCATCAAGTTTCC (SEQ ID NO: 3130) |
| | | | | | CGCTGACCACTGAGTAGGCTGTGAA (SEQ ID NO: 3131) |
| | | | | | ACAACAGCCTACTTGTGTTCACTGT (SEQ ID NO: 3132) |
| | | | | | AAGTCAACACTCTGATTCAGTCTGA (SEQ ID NO: 3133) |
| | | | | | CTCCTGACTACGATGCTTTGGTTGT (SEQ ID NO: 3134) |
| | | | | | GATGCTTTGGTTGTTGCCACCAAAA (SEQ ID NO: 3135) |
| 220960_x_at | RPL22 | EAP, HBP15, | ribosomal protein L22 | 6146 | AATTCTGATGTCGTACCTAAGGCTT (SEQ ID NO: 3136) |
| | | HBP15/L22 | | | ACCTAAGGCTTGTCCATCTTTGTTG (SEQ ID NO: 3137) |
| | | | | | TTGTTGGAGGTGCCATGGCTCCTGT (SEQ ID NO: 3138) |
| | | | | | TGAAGTTCACTCTTGATTGCACCCA (SEQ ID NO: 3139) |
| | | | | | ATTGCACCCACCCTGTAGAAGATGG (SEQ ID NO: 3140) |
| | | | | | GGAGCAAGAGCAAGATCACCGTGAC (SEQ ID NO: 3141) |
| | | | | | ATCACCGTGACATCCGAGGTGCCTT (SEQ ID NO: 3142) |
| | | | | | GAATAATCTACGTGACTGGTTGCGC (SEQ ID NO: 3143) |
| | | | | | CTGGTTGCGCGTAGTTGCTAACAGC (SEQ ID NO: 3144) |
| | | | | | TACGAATTACGTTACTTCCAGATTA (SEQ ID NO: 3145) |
| | | | | | TTTATCCTTGTATCTCTGCAGTGTG (SEQ ID NO: 3146) |
| 200937_s_at | RPL5 | MGC117339, | ribosomal protein L5 | 6125 | GTGGAGGTGACTGGTGATGAATACA (SEQ ID NO: 3147) |
| | | MSTP030 | | | GTGACTGGTGATGAATACAATGTGG (SEQ ID NO: 3148) |
| | | | | | AAGCATTGATGGTCAGCCAGGTGCC (SEQ ID NO: 3149) |
| | | | | | ATTGATGGTCAGCCAGGTGCCTTCA (SEQ ID NO: 3150) |
| | | | | | TGCCTTCACCTGCTATTTGGATGCA (SEQ ID NO: 3151) |
| | | | | | GCTATTTGGATGCAGGCCTTGCCAG (SEQ ID NO: 3152) |
| | | | | | AGGCCTTGCCAGAACTACCACTGGC (SEQ ID NO: 3153) |
| | | | | | CAGAACTACCACTGGCAATAAAGTT (SEQ ID NO: 3154) |
| | | | | | GCAGAAGTACATCGGAAGCACATCA (SEQ ID NO: 3155) |
| | | | | | TGCAGATTACATGCGCTACTTAATG (SEQ ID NO: 3156) |
| | | | | | TACATGCGCTACTTAATGGAAGAAG (SEQ ID NO: 3157) |
| 214167_s_at | RPLP0 /// | RPLP0 /// | ribosomal protein, | 6175 | CCATTGCCCCATGTGAAGTCACTGT (SEQ ID NO: 3158) |
| | RPLP0-like | RPLP0-like, | large, P0 /// | 220717 | CCCCATGTGAAGTCACTGTGCCAGC (SEQ ID NO: 3159) |
| | | L10E, | ribosomal protein P0- | | CCAGCCCAGAACACTGGTCTCGGGC (SEQ ID NO: 3160) |
| | | MGC111226, | like | | AGCCCAGAACACTGGTCTCGGGCCC (SEQ ID NO: 3161) |
| | | MGC88175, P0, | | | GAACACTGGTCTCGGGCCCGAGAAG (SEQ ID NO: 3162) |
| | | PRLP0, RPP0 | | | TGGTCTCGGGCCCGAGAAGACCTCC (SEQ ID NO: 3163) |
| | | | | | TTTTTCCAGGCTTTAGGTATCACCA (SEQ ID NO: 3164) |
| | | | | | GGTATCACCACTAAAATCTCCAGGG (SEQ ID NO: 3165) |
| | | | | | CACCACTAAAATCTCCAGGGGCACC (SEQ ID NO: 3166) |
| | | | | | TAAAATCTCCAGGGGCACCATTGAA (SEQ ID NO: 3167) |
| | | | | | ATCTCCAGGGGCACCATTGAAATCC (SEQ ID NO: 3168) |
| 211487_x_at | RPS17 | MGC72007, | ribosomal protein | 6218 | GCCAAGGCAGGCGATCACATGAGGT (SEQ ID NO: 3169) |
| | | RPS17L1, | S17 | | CGCGTTCGCACCAAAACCGTGAAGA (SEQ ID NO: 3170) |
| | | RPS17L2 | | | TAGAAAAGTACTACACGCGCCTGGG (SEQ ID NO: 3171) |
| | | | | | TGCGAGGAGATCGCCATTATCCCCA (SEQ ID NO: 3172) |
| | | | | | TATCCCCAGCAAAAAGCTCCGCAAC (SEQ ID NO: 3173) |
| | | | | | GATAGCAGGTTATGTCACGCATCTG (SEQ ID NO: 3174) |
| | | | | | GTAAGAGGTATCTCCATCAAGCTGC (SEQ ID NO: 3175) |
| | | | | | TCCTGAGGTCTCAGCCTTGGATCAG (SEQ ID NO: 3176) |
| | | | | | GCTTTTGGACTTCGGCAGTCTGTCC (SEQ ID NO: 3177) |
| | | | | | GTCACTCAGCCTACAGTTGGGATGA (SEQ ID NO: 3178) |
| | | | | | GATGAATTTCAAAACGCCTCGGGGA (SEQ ID NO: 3179) |
| 218007_s_at | RPS27L | 40S ribosomal | ribosomal protein | 51065 | GCTAGCTGTGTGGGCTGGGAGGTCT (SEQ ID NO: 3180) |
| | | protein S27-like | S27-like | | GCTGGGAGGTCTGGTAGGGCTGAGC (SEQ ID NO: 3181) |
| | | | | | AGAGGATCAACATGCCTTTGGCTAG (SEQ ID NO: 3182) |
| | | | | | TAGAGATTTACTACATCCGTCCTTG (SEQ ID NO: 3183) |
| | | | | | GAAACGCCTAGTACAAAGTCCAAAT (SEQ ID NO: 3184) |
| | | | | | GGATGTAAAATGTCCAGGTTGCTAC (SEQ ID NO: 3185) |
| | | | | | GTTGCTACAAGATCACCACGGTTTT (SEQ ID NO: 3186) |
| | | | | | GCCATGCTCAGACAGTGGTTCTTTG (SEQ ID NO: 3187) |
| | | | | | CACTAATGATTCAAACAGCTTCCTG (SEQ ID NO: 3188) |
| | | | | | GTGTTGTCTCACAGAAAGCCTTATC (SEQ ID NO: 3189) |
| | | | | | GGTATACAGCAGTAATCTCCTATTT (SEQ ID NO: 3190) |
| 200099_s_at | RPS3A /// | FTE1, MFTL, | ribosomal protein | 6189 | TTGAAGTGAGTCTTGCTGATTTGCA (SEQ ID NO: 3191) |
| | LOC439992 | MGC23240 /// | S3A /// similar to v- | 439992 | GAGTCTTGCTGATTTGCAGAATGAT (SEQ ID NO: 3192) |
| | | | fos transformation | | TCAAGCTGATTACTGAAGATGTTCA (SEQ ID NO: 3193) |
| | | | effector protein | | GTAAAAACTGCCTGACTAACTTCCA (SEQ ID NO: 3194) |
| | | | | | AAACTGCCTGACTAACTTCCATGGC (SEQ ID NO: 3195) |
| | | | | | GGCAGACAATGATTGAAGCTCACGT (SEQ ID NO: 3196) |
| | | | | | TTGAAGCTCACGTTGATGTCAAGAC (SEQ ID NO: 3197) |
| | | | | | TACGGAAGACCTCTTATGCTCAGCA (SEQ ID NO: 3198) |
| | | | | | GGAAATCATGACCCGAGAGGTGCAG (SEQ ID NO: 3199) |
| | | | | | GACCCGAGAGGTGCAGACAAATGAC (SEQ ID NO: 3200) |
| | | | | | GAGAGGTGCAGACAAATGACTTGAA (SEQ ID NO: 3201) |
| 213098_at | RQCD1 | RCD1; CNOT9; | RCD1 required for | 9215 | ACAGCTCAGGTTTTATCACCGACTG (SEQ ID NO: 3202) |
| | | RCD1+ | cell differentiation1 | | ACCTCAATGCTGAACCGCACTGGAG (SEQ ID NO: 3203) |
| | | | homolog (S. pombe) | | CAAGGTACCCCTGCTGAGGTGTATG (SEQ ID NO: 3204) |
| | | | | | CCCTCTGCTACTCCCAGGAAATGGG (SEQ ID NO: 3205) |
| | | | | | ACCACAGCCCCAGGAGGGTGTCAAC (SEQ ID NO: 3206) |
| | | | | | ATAGCAGCAGCACTCTAGGCATGGT (SEQ ID NO: 3207) |
| | | | | | GCATGGTGAACGCCTGGGACCAAGC (SEQ ID NO: 3208) |
| | | | | | GGGACCAAGCCATGTGGCGTTTTTT (SEQ ID NO: 3209) |
| | | | | | AAGATATGTCTCTTCATTCTCTCTC (SEQ ID NO: 3210) |
| | | | | | TCATTCTCTCTCAGTATTTGTTTAC (SEQ ID NO: 3211) |
| | | | | | GCAAAACTTTGTCGACTGGCACTGT (SEQ ID NO: 3212) |
| 34408_at | RTN2 | NSP2, NSPL1 | reticulon 2 | 6253 | TCCGAGCTAAAATCCCAGGGACCGG (SEQ ID NO: 3213) |
| | | | | | TTACCTGAGCGACCAGGACTACATT (SEQ ID NO: 3214) |
| | | | | | GCCTGCTGGGACTTGTAGTTGCCTA (SEQ ID NO: 3215) |
| | | | | | TGCTGGGACTTGTAGTTGCCTAGAC (SEQ ID NO: 3216) |
| | | | | | TGGGACTTGTAGTTGCCTAGACAGG (SEQ ID NO: 3217) |
| | | | | | TGTAGTTGCCTAGACAGGGCACCAC (SEQ ID NO: 3218) |
| | | | | | GTAGTTGCCTAGACAGGGCACCACC (SEQ ID NO: 3219) |
| | | | | | AGGCGTTGGTGTCTCCTGGATGCTA (SEQ ID NO: 3220) |
| | | | | | GGCGTTGGTGTCTCCTGGATGCTAC (SEQ ID NO: 3221) |
| | | | | | GCGTTGGTGTCTCCTGGATGCTACT (SEQ ID NO: 3222) |
| | | | | | CGTTGGTGTCTCCTGGATGCTACTA (SEQ ID NO: 3223) |
| | | | | | GGGAGGCCTGAGCTTGGATTTACAC (SEQ ID NO: 3224) |
| | | | | | GGAGGCCTGAGCTTGGATTTACACT (SEQ ID NO: 3225) |
| | | | | | GGCCTGAGCTTGGATTTACACTGTA (SEQ ID NO: 3226) |
| | | | | | CTGAGCTTGGATTTACACTGTAATA (SEQ ID NO: 3227) |
| | | | | | CTTGGATTTACACTGTAATAAAGAC (SEQ ID NO: 3228) |
| 216976_s_at | RYK | D3S3195, JTK5, | RYK receptor-like | 6259 | AGGCCAGTTCGTTGGATGGCTCTTG (SEQ ID NO: 3229) |
| | | JTK5A, RYK1 | tyrosine kinase | | CTCTAGCGCTAGTGATGTGTGGGCC (SEQ ID NO: 3230) |
| | | | | | TGGGAACTCATGACTCTGGGCCAGA (SEQ ID NO: 3231) |
| | | | | | ATGGTTACCGAATAGCCCAGCCAAT (SEQ ID NO: 3232) |
| | | | | | CCCAGCCAATCAACTGTCCTGATGA (SEQ ID NO: 3233) |
| | | | | | TATTTGCTGTGATGGCCTGTTGCTG (SEQ ID NO: 3234) |
| | | | | | CCTGTTGCTGGGCCTTAGATCCAGA (SEQ ID NO: 3235) |
| | | | | | GTTTCAGCAGCTGGTACAGTGCCTA (SEQ ID NO: 3236) |
| | | | | | GCCTAACAGAGTTTCATGCAGCCCT (SEQ ID NO: 3237) |
| | | | | | AGGAAGAAGGTGCCTGTCGGGGCTC (SEQ ID NO: 3238) |
| | | | | | TCGGGGCTCACTTGAAGCCTGTCAG (SEQ ID NO: 3239) |
| 218276_s_at | SAV1 | SAV, WW45, | salvador homolog 1 | 60485 | AGTTGCTAACATCATCTTCCTTATT (SEQ ID NO: 3240) |
| | | WWP4 | (Drosophila) | | TTCAGCCAGTGCTGTTACTGCATTT (SEQ ID NO: 3241) |
| | | | | | GTTACTGCATTTAGCATGGCTCTGA (SEQ ID NO: 3242) |
| | | | | | GCATGGCTCTGACGAGGCAGTGGAG (SEQ ID NO: 3243) |
| | | | | | GCAGTGGAGAGTTCCTGACAGCATA (SEQ ID NO: 3244) |
| | | | | | GACAGCATAGCATACTGCCTTCTGA (SEQ ID NO: 3245) |
| | | | | | AGCATACTGCCTTCTGACAGACTGG (SEQ ID NO: 3246) |
| | | | | | GACAGACTGGGTTAAGCTACCAAAA (SEQ ID NO: 3247) |
| | | | | | GACTTTAACACCATATATTTCCCTC (SEQ ID NO: 3248) |
| | | | | | GTCTTCCAGAATACAAACTACTCCC (SEQ ID NO: 3249) |
| | | | | | ACTACTCCCAGTTAGATATCAGTGA (SEQ ID NO: 3250) |
| 212416_at | SCAMP1 | SCAMP, | secretory carrier | 9522 | TTAGAACCCACATATCTTTTTTTGT (SEQ ID NO: 3251) |
| | | SCAMP37 | membrane protein 1 | | GATTGGCATTTGTTAAGTGTTCTAT (SEQ ID NO: 3252) |
| | | | | | TAAAATGGTCTTCACACAGCAGTCA (SEQ ID NO: 3253) |
| | | | | | TTCACACAGCAGTCATCCGTGTCAT (SEQ ID NO: 3254) |
| | | | | | GTCATCCGTGTCATTTATCATTTTG (SEQ ID NO: 3255) |
| | | | | | GGGACTTGGATTATTTATCTAGAGA (SEQ ID NO: 3256) |
| | | | | | TAACTAATACTGCGCTGCCATCATG (SEQ ID NO: 3257) |
| | | | | | GCGCTGCCATCATGGTGACTGTCAT (SEQ ID NO: 3258) |
| | | | | | GTCATGGTTCTACAGAAATGCCCTC (SEQ ID NO: 3259) |
| | | | | | TCCATGTGTCCCTCTAATGTTGCAT (SEQ ID NO: 3260) |
| | | | | | AATGTTGCATGTTTCAGTGGGTTGG (SEQ ID NO: 3261) |
| 204035_at | SCG2 | CHGC, SN, SgII | secretogranin II | 7857 | CCCGGTGAGCAAAAGGTTCCCTGTG (SEQ ID NO: 3262) |
| | | | (chromogranin C) | | TCCCTGTGGGGCCCCCGAAGAATGA (SEQ ID NO: 3263) |
| | | | | | ATGATACCCCAAATAGGCAGTACTG (SEQ ID NO: 3264) |
| | | | | | GAAAGTGCTGGAATACCTCAATCAA (SEQ ID NO: 3265) |
| | | | | | CATTAATTACCCTACTTTCATTCCT (SEQ ID NO: 3266) |
| | | | | | AGTGTGTTGACTTCTATCCTGTTAA (SEQ ID NO: 3267) |
| | | | | | CAGGCAGATGAAACCAGGTCACTGG (SEQ ID NO: 3268) |
| | | | | | CTGAGCTGTTATCTTGTGTATGGAT (SEQ ID NO: 3269) |
| | | | | | GTGTAAATGTTATGACTCCTTGATA (SEQ ID NO: 3270) |
| | | | | | GCTGTGGCATTGTTGATGCTCACAT (SEQ ID NO: 3271) |
| | | | | | GTTACTGTCTGTAGCGTTTTGTGGA (SEQ ID NO: 3272) |
| 212698_s_at | SEPT10 | FLJ11619 | septin 10 | 151011 | GATCTTAAGCTTTTGTGTCAGATTA (SEQ ID NO: 3273) |
| | | | | | TGATGACTTCATGCTTTATTATGCC (SEQ ID NO: 3274) |
| | | | | | TATGCCTTATTATGGCTGACGTATT (SEQ ID NO: 3275) |
| | | | | | GGCTGACGTATTACTGTGGTGAAAC (SEQ ID NO: 3276) |
| | | | | | ATAAAGTACCTTTGAGCATGAGTGT (SEQ ID NO: 3277) |
| | | | | | GCATGAGTGTATCACAGCTTTCATT (SEQ ID NO: 3278) |
| | | | | | GGAAAACTTTTCATTACATACTTGT (SEQ ID NO: 3279) |
| | | | | | ACTTGTTTAAACTCTGTCTTCCAGG (SEQ ID NO: 3280) |
| | | | | | TTCAGGTGGTATTTGCATTCAGTGC (SEQ ID NO: 3281) |
| | | | | | AGTGCCTTACTGGTATTCTCAGAAC (SEQ ID NO: 3282) |
| | | | | | AATAAAACTGACATTTACTCTTGAC (SEQ ID NO: 3283) |
| 214720_x_at | SEPT10 | FLJ11619 | septin 10 | 151011 | GCTACAGGCCAAATTTGAGCACCTT (SEQ ID NO: 3284) |
| | | | | | GAGCACCTTAAGAGACTTCACCAAG (SEQ ID NO: 3285) |
| | | | | | CTACCTCCGAGATATTTCACAGCCA (SEQ ID NO: 3286) |
| | | | | | TTCACAGCCAGTCCTTTCTGGCAAC (SEQ ID NO: 3287) |
| | | | | | GTCCTTTCTGGCAACAGGCAGCAAC (SEQ ID NO: 3288) |
| | | | | | GACAAGGACCGTAAGAACTCCAATT (SEQ ID NO: 3289) |
| | | | | | GAGCACAGAAGGTCATCATCACAAG (SEQ ID NO: 3290) |
| | | | | | GCTGTTATTTGTTTTATCACTTCTA (SEQ ID NO: 3291) |
| | | | | | GGTGAACAGCCACAGTTACTGATAT (SEQ ID NO: 3292) |
| | | | | | GATACTACAAGTTGAGCATCTCTAA (SEQ ID NO: 3293) |
| | | | | | TCTTTTTGAGCACTGACTTGACCCC (SEQ ID NO: 3294) |
| 217724_at | SERBP1 | CGI-55, CHD3IP, | SERPINE1 mRNA | 26135 | AGTTACCTACTATTCTGACATTTTA (SEQ ID NO: 3295) |
| | | DKFZp564M2423, | binding protein 1 | | CTTGTGCTGGTGTTTTGGATCTTAT (SEQ ID NO: 3296) |
| | | FLJ90489, | | | GATGCTGAGCATGTTCTGCACTGGT (SEQ ID NO: 3297) |
| | | HABP4L, PAI- | | | TTTACACACATACGTGCTACCCAGA (SEQ ID NO: 3298) |
| | | RBP1, PAIRBP1 | | | AGACAGCAACATACGCACTCCTAAA (SEQ ID NO: 3299) |
| | | | | | AAGTATCTAACTCATTTCCAAACAT (SEQ ID NO: 3300) |
| | | | | | TAAACCTCTTGATTTCCAGCAACAT (SEQ ID NO: 3301) |
| | | | | | AACACCTGCTACTCAAAACACAACT (SEQ ID NO: 3302) |
| | | | | | ATATCTGGTATGTTGCAAGCTTTCA (SEQ ID NO: 3303) |
| | | | | | ATAAATTTGCCTCCTAGTTCACTTT (SEQ ID NO: 3304) |
| | | | | | TGAACCTAACTTTCTCTTATGGTG (SEQ ID NO: 3305) |
| 202833_s_at | SERPINA1 | A1A, A1AT, AAT, | serpin peptidase | 5265 | GAAGCGTTTAGGCATGTTTAACATC (SEQ ID NO: 3306) |
| | | MGC23330, | inhibitor, clade A | | GCATGTTTAACATCCAGCACTGTAA (SEQ ID NO: 3307) |
| | | MGC9222, PI, | (alpha-1 | | AGCACTGTAAGAAGCTGTCCAGCTG (SEQ ID NO: 3308) |
| | | PI1, PRO2275 | antiproteinase, | | GAGGGGAAACTACAGCACCTGGAAA (SEQ ID NO: 3309) |
| | | | antitrypsin), member 1 | | CACCTGGAAAATGAACTCACCCACG (SEQ ID NO: 3310) |
| | | | | | ATGAACTCACCCACGATATCATCAC (SEQ ID NO: 3311) |
| | | | | | CCCACGATATCATCACCAAGTTCCT (SEQ ID NO: 3312) |
| | | | | | GAAGACAGAAGGTCTGCCAGCTTAC (SEQ ID NO: 3313) |
| | | | | | GAAGGTCTGCCAGCTTACATTTACC (SEQ ID NO: 3314) |
| | | | | | GCTTACATTTACCCAAACTGTCCAT (SEQ ID NO: 3315) |
| | | | | | TTACCCAAACTGTCCATTACTGGAA (SEQ ID NO: 3316) |
| 211429_s_at | SERPINA1 | A1A, A1AT, AAT, | serpin peptidase | 5265 | TACTGGAACCTATGATCTGAAGAGC (SEQ ID NO: 3317) |
| | | MGC23330, | inhibitor, clade A | | ACCTATGATCTGAAGAGCGTCCTGG (SEQ ID NO: 3318) |
| | | MGC9222, PI, | (alpha-1 | | TGGGTCAACTGGGCATCACTAAGGT (SEQ ID NO: 3319) |
| | | PI1, PRO2275 | antiproteinase, | | GGTCAACTGGGCATCACTAAGGTCT (SEQ ID NO: 3320) |
| | | | antitrypsin), member 1 | | GGCCGTGCATAAGGCTGTGCTGACC (SEQ ID NO: 3321) |
| | | | | | TGCATAAGGCTGTGCTGACCATCGA (SEQ ID NO: 3322) |
| | | | | | AAACCCTTTGTCTTCTTAATGATTG (SEQ ID NO: 3323) |
| | | | | | CCTTTGTCTTCTTAATGATTGAACA (SEQ ID NO: 3324) |
| | | | | | TGAACAAAATACCAAGTCTCCCCTC (SEQ ID NO: 3325) |
| | | | | | CACCCAAAAATAACTGCCTCTCGCT (SEQ ID NO: 3326) |
| | | | | | CCCCCTCCCTGGATGACATTAAAGA (SEQ ID NO: 3327) |
| 201070_x_at | SF3B1 | PRP10, PRPF10, | splicing factor 3b, | 23451 | TGGATGGGCTGAGACTCCTCGAACA (SEQ ID NO: 3328) |
| | | SAP155, | subunit 1, 155 kDa | | TGGGTGGAAGCACTCCAGTTCTGAC (SEQ ID NO: 3329) |
| | | SF3b155 | | | AGTTCTGACCCCTGGAAAGACACCA (SEQ ID NO: 3330) |
| | | | | | AAAGACACCAATTGGCACACCAGCC (SEQ ID NO: 3331) |
| | | | | | ACCCCTACTCCAGGTCACATAATGA (SEQ ID NO: 3332) |
| | | | | | TGAACAGCTTCAGGCTTGGCGGTGG (SEQ ID NO: 3333) |
| | | | | | AAATCGCCCACTTTCTGATGAGGAA (SEQ ID NO: 3334) |
| | | | | | AGGATATAAGGTACTTCCTCCTCCA (SEQ ID NO: 3335) |
| | | | | | TCCTCCAGCTGGTTATGTTCCTATT (SEQ ID NO: 3336) |
| | | | | | GTTCCTATTCGAACTCCAGCTCGAA (SEQ ID NO: 3337) |
| | | | | | CAGCTACTCCAACACCTTTGGGTGG (SEQ ID NO: 3338) |
| 201586_s_at | SFPQ | POMP100, PSF | splicing factor | 6421 | GCCATTCATGCTTCTATGCATATTA (SEQ ID NO: 3339) |
| | | | proline/glutamine-rich | | ATATTAGGCTACGTATTCCACATTG (SEQ ID NO: 3340) |
| | | | (polypyrimidine tract | | AAGCATGAGAGTGTCTAGGCCTTTG (SEQ ID NO: 3341) |
| | | | binding protein | | TAGGCCTTTGAATGGCATATGCCAT (SEQ ID NO: 3342) |
| | | | associated) | | TCTGGGAAATGCATCTGGAGGCTAA (SEQ ID NO: 3343) |
| | | | | | GGAGGCTAAGTATTGCTTTCTACAA (SEQ ID NO: 3344) |
| | | | | | GTTTGGCATATAGGAAGCACGCTGG (SEQ ID NO: 3345) |
| | | | | | GCACGCTGGTGCTAAGTATTTTTTA (SEQ ID NO: 3346) |
| | | | | | AAATGGATCTTTTATGGCCCTATGA (SEQ ID NO: 3347) |
| | | | | | GCCCTATGATCTATCCTTTACTTGA (SEQ ID NO: 3348) |
| | | | | | AAAGACCAACAAATCTCAAGCCCTA (SEQ ID NO: 3349) |
| 214492_at | SGCD | 35DAG, CMD1L, | sarcoglycan, delta | 6444 | ATCAGGCTACCTAGACTGCCTCATG (SEQ ID NO: 3350) |
| | | DAGD, | (35 kDa dystrophin- | | GATCCTACACGCCTACAGGAACGAG (SEQ ID NO: 3351) |
| | | MGC22567, SG- | associated | | CAGAAGGTCTTCGAGATCTGCGTCT (SEQ ID NO: 3352) |
| | | delta, SGCDP, | glycoprotein) | | TCTGCGTCTGCGCCAATGGGAGATT (SEQ ID NO: 3353) |
| | | SGD | | | GAGCTGGGTCCACTTGTCAGATAAA (SEQ ID NO: 3354) |
| | | | | | AAACACAAGTGTCTGCCTCTGAAAG (SEQ ID NO: 3355) |
| | | | | | CCTTTTTTGGCTTTAGACACTGGCT (SEQ ID NO: 3356) |
| | | | | | ACACTGGCTGCCAGCTATTTTTACT (SEQ ID NO: 3357) |
| | | | | | GTGTGCGTGCTTGAGTGTGTTCGCG (SEQ ID NO: 3358) |
| | | | | | GTGTTCGCGTGTGTGGGTGGATATA (SEQ ID NO: 3359) |
| | | | | | CTGCGATATCCACTGTCATTTTCCA (SEQ ID NO: 3360) |
| 210796_x_at | SIGLEC6 | CD327, CD33L, | sialic acid binding Ig- | 946 | AATCTCTCTGAGTCTCTTTGTGCAT (SEQ ID NO: 3361) |
| | | CD33L1, | like lectin 6 | | CTTTGTGCATTGGTCATCAGCACCA (SEQ ID NO: 3362) |
| | | CDw327, | | | ATCAGCACCAGTTCCAGACAGGCAT (SEQ ID NO: 3363) |
| | | OBBP1, SIGLEC-6 | | | GACAGGCATAGTTTCAGACCACCCT (SEQ ID NO: 3364) |
| | | | | | GTCCTACACTTCCACAAGGTGCAAC (SEQ ID NO: 3365) |
| | | | | | AAAGGTCACCGACACTGAGTACTCA (SEQ ID NO: 3366) |
| | | | | | GAACATGGTACCTCTCAGTGTATTG (SEQ ID NO: 3367) |
| | | | | | CTAAGGCCTCTCTTGTTGGCTTGTA (SEQ ID NO: 3368) |
| | | | | | ACATGGTCTTTCCTCTGAGTGTGTT (SEQ ID NO: 3369) |
| | | | | | TGTCCTAATCTTCTCTTCTTATAAA (SEQ ID NO: 3370) |
| | | | | | ATATTGGATTAGGGCCTCCCCATGA (SEQ ID NO: 3371) |
| 204587_at | SLC25A14 | RP1-20I3.5, | solute carrier family | 9016 | CTGAATTATATGTGAGCCCAGCCCT (SEQ ID NO: 3372) |
| | | BMCP1, | 25 (mitochondrial | | TTTTCCCGTGTTCTAATGTATTTTG (SEQ ID NO: 3373) |
| | | MGC149543, | carrier, brain), | | GTGTTTACCAAGCCGTTGGTCTCCT (SEQ ID NO: 3374) |
| | | UCP5 | member 14 | | TCTCCTAAGGGCCTCCTGATGGAAG (SEQ ID NO: 3375) |
| | | | | | GTGTTAACATTGAGACTCTGGCCCC (SEQ ID NO: 3376) |
| | | | | | TGGCCCCAGATTGGTATCTTCTATG (SEQ ID NO: 3377) |
| | | | | | GGGTGACATTGAAAACGGCCTGCTT (SEQ ID NO: 3378) |
| | | | | | TGAAAACGGCCTGCTTTCCAAATGT (SEQ ID NO: 3379) |
| | | | | | GTAATTGGTTAGCCCCAGACTTGGG (SEQ ID NO: 3380) |
| | | | | | GAAGGCATAGGCCAGGGTGGTTATT (SEQ ID NO: 3381) |
| | | | | | ATGTGTTACAGACCTCGGTTCTCAT (SEQ ID NO: 3382) |
| 200030_s_at | SLC25A3 | D1S155E, | solute carrier family | 5250 | ACACCATGATGAAGTTCGCCTGCTT (SEQ ID NO: 3383) |
| | | MGC165858 | 25 (mitochondrial | | TCGCCTGCTTTGAACGTACTGTTGA (SEQ ID NO: 3384) |
| | | | carrier; phosphate | | TGTACAAGTTTGTGGTTCCTAAGCC (SEQ ID NO: 3385) |
| | | | carrier), member 3 | | TCCTAAGCCCCGCAGTGAATGTTCA (SEQ ID NO: 3386) |
| | | | | | ACCCTGCTGATTCTGTGGTATCTGT (SEQ ID NO: 3387) |
| | | | | | AAAGGTAGCAGTGCTTCTCTGGTCC (SEQ ID NO: 3388) |
| | | | | | GTGCTTCTCTGGTCCTCAAGAGACT (SEQ ID NO: 3389) |
| | | | | | TCATCATGATTGGTACCCTGACTGC (SEQ ID NO: 3390) |
| | | | | | GTACCCTGACTGCACTACAGTGGTT (SEQ ID NO: 3391) |
| | | | | | GTGGTTTATCTATGACTCCGTGAAG (SEQ ID NO: 3392) |
| | | | | | GTGAAGGTCTACTTCAGACTTCCTC (SEQ ID NO: 3393) |
| 209267_s_at | SLC39A8 | BIGM103; LZT- | solute carrier family | 64116 | AATGCAAAACAACAGCTGGACTGCT (SEQ ID NO: 3394) |
| | | Hs6 | 39 (zinc transporter), | | AGCTGGACTGCTGTACATCAAGGAC (SEQ ID NO: 3395) |
| | | | member 8 | | GTTCCTTATGTGTGATTGAGAGCCA (SEQ ID NO: 3396) |
| | | | | | GCCATTCAGAAAAGACTTCCTTTGT (SEQ ID NO: 3397) |
| | | | | | TTGTGTTCAGCCTATACTTTTCCAT (SEQ ID NO: 3398) |
| | | | | | TACTTTTCCATATGGTATACCTTGA (SEQ ID NO: 3399) |
| | | | | | ATTAGCACACCATGGTTATTTTTCT (SEQ ID NO: 3400) |
| | | | | | AAGACAGAGCCTGTTTACTCATTTA (SEQ ID NO: 3401) |
| | | | | | TGAACATCCTAGATTCACACTCCCA (SEQ ID NO: 3402) |
| | | | | | GACAAAGCCCAACAATGATCTCAGG (SEQ ID NO: 3403) |
| | | | | | ATGTTTTCATGTAGCAGCAATGCAG (SEQ ID NO: 3404) |
| 219869_s_at | SLC39A8 | BIGM103; LZT- | solute carrier family | 64116 | GGATGATAACGCTCTGCGATGCCCT (SEQ ID NO: 3405) |
| | | Hs6 | 39 (zinc transporter), | | TGCCCTCCACAATTTCATCGATGGC (SEQ ID NO: 3406) |
| | | | member 8 | | TCGATGGCCTGGCGATTGGGGCTTC (SEQ ID NO: 3407) |
| | | | | | GACTCAGTACTTCCATAGCAATCCT (SEQ ID NO: 3408) |
| | | | | | ATGTGAGGAGTTTCCCCACGAGTTA (SEQ ID NO: 3409) |
| | | | | | GAGACTTTGTGATCCTACTCAATGC (SEQ ID NO: 3410) |
| | | | | | AGGGATGAGCACTCGACAAGCCTTG (SEQ ID NO: 3411) |
| | | | | | ACAAGCCTTGCTATTCAACTTCCTT (SEQ ID NO: 3412) |
| | | | | | TGGTGGGCAACAATTTCGCTCCAAA (SEQ ID NO: 3413) |
| | | | | | GAAAAACCGATTTCACCTTCTTCAT (SEQ ID NO: 3414) |
| | | | | | GCCATTCTACTCATTACCTTGTATG (SEQ ID NO: 3415) |
| 209257_s_at | SMC3 | BAM, BMH, | structural | 9126 | GTAGATCCCTTCAGTTCAAAACATA (SEQ ID NO: 3416) |
| | | CDLS3, CSPG6, | maintenance of | | GAGTTTAGTCATCTTCGTCCAGAAC (SEQ ID NO: 3417) |
| | | HCAP, SMC3L1 | chromosomes 3 | | TCGTCCAGAACAGCGGTTGGCTTTA (SEQ ID NO: 3418) |
| | | | | | ATTGCATGAAGGTACTGGTCCTCGT (SEQ ID NO: 3419) |
| | | | | | AGGTACTGGTCCTCGTGTTATTTCT (SEQ ID NO: 3420) |
| | | | | | AATTCAGACAACCGGTTACCAATCG (SEQ ID NO: 3421) |
| | | | | | ACTTCGAAGAGTTATTGGTGCCAAA (SEQ ID NO: 3422) |
| | | | | | AAATGATGTGATGAACCTCCTTGAA (SEQ ID NO: 3423) |
| | | | | | GAACCTCCTTGAAAGCGCTGGTTTT (SEQ ID NO: 3424) |
| | | | | | GCGCTGGTTTTTCTCGAAGCAATCC (SEQ ID NO: 3425) |
| | | | | | GCAACAGCACCAGATTCTCAGAGAT (SEQ ID NO: 3426) |
| 201793_x_at | SMG7 | RP1-127C7.1, | Smg-7 homolog, | 9887 | CCCCGCCTGTGGCATTTTCTATGGG (SEQ ID NO: 3427) |
| | | C1orf16, EST1C, | nonsense mediated | | TTTCTATGGGCTCAGGTTACACCTT (SEQ ID NO: 3428) |
| | | FLJ23717, | mRNA decay factor | | CAGCTGGTGTTTCTGTCCCAGGAAC (SEQ ID NO: 3429) |
| | | KIAA0250, | (C. elegans) | | CTCACTCTCCAGCAGGAAACCAGGT (SEQ ID NO: 3430) |
| | | SGA56M, SMG-7 | | | GACCAGGGCCAATGAACCAGGGACC (SEQ ID NO: 3431) |
| | | | | | ATCTTTACCAGCTCAGCCAACAGCA (SEQ ID NO: 3432) |
| | | | | | GCCAACAGCACAGTCTACAAGCCAG (SEQ ID NO: 3433) |
| | | | | | GCTGCAGGTTCAAGCTCTAACTCAG (SEQ ID NO: 3434) |
| | | | | | CTAACTCAGCAACAACAATCCCCTA (SEQ ID NO: 3435) |
| | | | | | CCTCACCACTCTGGATTCCAGCAGT (SEQ ID NO: 3436) |
| | | | | | TGTTTGAGCCGTCATTGCAACCTCC (SEQ ID NO: 3437) |
| 205596_s_at | SMURF2 | DKFZp686F0270, | SMAD specific E3 | 64750 | GGTCTTTATGCTTTGCCATGAGGCC (SEQ ID NO: 3438) |
| | | MGC138150 | ubiquitin protein | | GAGGCCACATTCAGCTGCTATTTAA (SEQ ID NO: 3439) |
| | | | ligase 2 | | GAATGCTGACTTTTCCTACATTTCC (SEQ ID NO: 3440) |
| | | | | | TGACTTTTCCTACATTTCCAGAGTT (SEQ ID NO: 3441) |
| | | | | | GAGTTAGGCAGTATTCTACACTTAA (SEQ ID NO: 3442) |
| | | | | | TACACTTAAAGACTACTACTATTTT (SEQ ID NO: 3443) |
| | | | | | TCTTCACAGATTTCAAGTCTCTCAA (SEQ ID NO: 3444) |
| | | | | | AGATTTCAAGTCTCTCAAACATCAA (SEQ ID NO: 3445) |
| | | | | | TCAAGACAACTTCAGCAGTCGGTAC (SEQ ID NO: 3446) |
| | | | | | GCAGTCGGTACAAGTCACATTTCAT (SEQ ID NO: 3447) |
| | | | | | ACAAGTCACATTTCATTTTGATTGA (SEQ ID NO: 3448) |
| 200826_at | SNRPD2 | SMD2, SNRPD1 | small nuclear | 6633 | GAGCGTAGTGACCATCATGAGCCTC (SEQ ID NO: 3449) |
| | | | ribonucleoprotein D2 | | GCCCAAGAGTGAGATGACCCCAGAG (SEQ ID NO: 3450) |
| | | | polypeptide 16.5 kDa | | GAGGAATTTAACACCGGTCCACTCT (SEQ ID NO: 3451) |
| | | | | | CACTCTCTGTGCTCACACAGTCAGT (SEQ ID NO: 3452) |
| | | | | | GAACAATACCCAAGTGCTCATCAAC (SEQ ID NO: 3453) |
| | | | | | TGCTCATCAACTGCCGCAACAATAA (SEQ ID NO: 3454) |
| | | | | | GAAGGCCTTCGATAGGCACTGCAAC (SEQ ID NO: 3455) |
| | | | | | GTGGACTGAGGTACCCAAGAGTGGC (SEQ ID NO: 3456) |
| | | | | | ACATCTCCAAGATGTTCCTGCGCGG (SEQ ID NO: 3457) |
| | | | | | TCATCGCCGGCAAGTAGGGGCCGCC (SEQ ID NO: 3458) |
| | | | | | TCCTATGAAGACCGCTGCCATTGGT (SEQ ID NO: 3459) |
| 201562_s_at | SORD | SORD1 | sorbitol | 6652 | GATGTTAATGGGCTCTGCTCATCCC (SEQ ID NO: 3460) |
| | | | dehydrogenase | | GGGTGGGCTCTGATGCAGAACTTTC (SEQ ID NO: 3461) |
| | | | | | GGAACTTGTAGCCAGAATGCCCTGT (SEQ ID NO: 3462) |
| | | | | | GAATGCCCTGTTCATGCTGAGCAAA (SEQ ID NO: 3463) |
| | | | | | TTCTTCCTGGAGTGCCTTCATTGAG (SEQ ID NO: 3464) |
| | | | | | TCCACTGCTACTGACCCAGAGGGGA (SEQ ID NO: 3465) |
| | | | | | TCATGAAGACTTAACTGGCCCAGAA (SEQ ID NO: 3466) |
| | | | | | AAAATCTGCCACTCAGGGTCTGGGA (SEQ ID NO: 3467) |
| | | | | | GGGTCTGGGATGAAGGCTTGTCAGC (SEQ ID NO: 3468) |
| | | | | | GCTTGTCAGCACTTCCAGTTTAGAA (SEQ ID NO: 3469) |
| | | | | | GAAAAGGCATCACTTTCCTGGATCC (SEQ ID NO: 3470) |
| 201417_at | SOX4 | EVI16 | SRY (sex | 6659 | GTAAACCACATCTTTTTTGCACTTT (SEQ ID NO: 3471) |
| | | | determining region | | ACGTGCCGTTTAAACCACTGGATCT (SEQ ID NO: 3472) |
| | | | Y)-box 4 | | ACCACTGGATCTATCTAAATGCCGA (SEQ ID NO: 3473) |
| | | | | | AATGCCGATTTGAGTTCGCGACACT (SEQ ID NO: 3474) |
| | | | | | GCGACACTATGTACTGCGTTTTTCA (SEQ ID NO: 3475) |
| | | | | | TGTACTGCGTTTTTCATTCTTGTAT (SEQ ID NO: 3476) |
| | | | | | TGACTATTTAATCCTTTCTACTTGT (SEQ ID NO: 3477) |
| | | | | | TCCTTTCTACTTGTCGCTAAATATA (SEQ ID NO: 3478) |
| | | | | | GCACTAGGACGTCTGCCTTTTTAAG (SEQ ID NO: 3479) |
| | | | | | TTTTTTTGCCATCCATCCTGTGCAA (SEQ ID NO: 3480) |
| | | | | | TCCATCCTGTGCAATATGCCGTGTA (SEQ ID NO: 3481) |
| 222163_s_at | SPATA5L1 | FLJ12286, | spermatogenesis | 79029 | GAAGTGTCATGATTATTGCAGCAAC (SEQ ID NO: 3482) |
| | | MGC5347 | associated 5-like 1 | | AGACCTGATGTGTTAGATACTGCTT (SEQ ID NO: 3483) |
| | | | | | AGATACTGCTTTGTTACGACCTGGA (SEQ ID NO: 3484) |
| | | | | | CTCCTTAGAAAACCTCGCAGCAGAA (SEQ ID NO: 3485) |
| | | | | | GCACAGAAGCTGCTTTGCTGGCTCT (SEQ ID NO: 3486) |
| | | | | | CTGCTTTGCTGGCTCTGCAAGAAAA (SEQ ID NO: 3487) |
| | | | | | AATGGACTAGACGCAACTACAGTGA (SEQ ID NO: 3488) |
| | | | | | ACCGTCGTTAAGTTGCAAGGACTTG (SEQ ID NO: 3489) |
| | | | | | AAATCACCTTAAACTCTTGTTCAGT (SEQ ID NO: 3490) |
| | | | | | AAATGTGAACTTGCCTGTCGTTTGC (SEQ ID NO: 3491) |
| | | | | | GTCGTTTGCAACTTCACACTTTTAG (SEQ ID NO: 3492) |
| 220192_x_at | SPDEF | PDEF, RP11- | SAM pointed domain | 25803 | TGAACTACGACAAGCTGAGCCGCTC (SEQ ID NO: 3493) |
| | | 375E1_A.3, | containing ets | | GGGCATCATCCGGAAGCCAGACATC (SEQ ID NO: 3494) |
| | | bA375E1.3 | transcription factor | | GGAAAACGGGCAGTCTGCTCTGCTG (SEQ ID NO: 3495) |
| | | | | | CTGCTCTGACCTTCCAGAGCCCAAG (SEQ ID NO: 3496) |
| | | | | | GCTGCTCCCCTGGAGGACAGAGGGA (SEQ ID NO: 3497) |
| | | | | | AGAGGGAGACAGGGCTGCTCCCCAA (SEQ ID NO: 3498) |
| | | | | | CCAGCATTTCCAGAGCAGAGCCTAC (SEQ ID NO: 3499) |
| | | | | | GGGCAGTGACTCGACAAAGGCCACA (SEQ ID NO: 3500) |
| | | | | | AAAGGCCACAGGCAGTCCAGGCCTC (SEQ ID NO: 3501) |
| | | | | | TGCAGGGAGACATCTGCACCCCTGA (SEQ ID NO: 3502) |
| | | | | | GAGTTGGGCAGCCAGGAGTGCCCCC (SEQ ID NO: 3503) |
| 205064_at | SPRR1B | CORNIFIN, | small proline-rich | 6699 | TACAGAGTATTCCTCTCTTCACACC (SEQ ID NO: 3504) |
| | | GADD33, | protein 1B (cornifin) | | ACCAGCCACTGTTGCAGCATGAGTT (SEQ ID NO: 3505) |
| | | MGC61901, | | | TGTTGCAGCATGAGTTCCCAGCAGC (SEQ ID NO: 3506) |
| | | SPRR1 | | | TCCCATTCTGTGTATGAGTCCCATT (SEQ ID NO: 3507) |
| | | | | | TCTGTGTATGAGTCCCATTTGCCTT (SEQ ID NO: 3508) |
| | | | | | GAGTCCCATTTGCCTTGCAATTAGC (SEQ ID NO: 3509) |
| | | | | | GAATGTGCTATGAAGCTTTCTTTCC (SEQ ID NO: 3510) |
| | | | | | TTTCCTACACACTCTGAGTCTCTGA (SEQ ID NO: 3511) |
| | | | | | GCTGAAGGTCTTAGTACCAGAGCTA (SEQ ID NO: 3512) |
| | | | | | ACCAGAGCTAGTTTTCAGCTGCTCA (SEQ ID NO: 3513) |
| | | | | | GTTTTCAGCTGCTCAGAATTCATCT (SEQ ID NO: 3514) |
| 217995_at | SQRDL | CGI-44 | sulfide quinone | 58472 | TACGTCAAAGACCGCTGCTGCAGTA (SEQ ID NO: 3515) |
| | | | reductase-like (yeast) | | GCAGTAGCTGCCCAGTCAGGAATAC (SEQ ID NO: 3516) |
| | | | | | GCTACACATCATGTCCACTGGTGAC (SEQ ID NO: 3517) |
| | | | | | CACTGGTGACCGGCTACAACCGTGT (SEQ ID NO: 3518) |
| | | | | | ACAACCGTGTGATTCTTGCTGAGTT (SEQ ID NO: 3519) |
| | | | | | GCGCCTTTCCATGTATCTCATGAAA (SEQ ID NO: 3520) |
| | | | | | GACCAGCGTTTCTGCGCAAGTTGTT (SEQ ID NO: 3521) |
| | | | | | TAAGGATGGCTCAGCACTTGCTCAT (SEQ ID NO: 3522) |
| | | | | | GGCTTCTGGGCCAAAACTGCAGTCA (SEQ ID NO: 3523) |
| | | | | | GTAATGGTGACCAAATGCCTCCCTT (SEQ ID NO: 3524) |
| | | | | | GTGGGCTACTCATGATGGGCTTGAT (SEQ ID NO: 3525) |
| 208801_at | SRP72 | | signal recognition | 6731 | GGTCACATGGGTTTGGACTGTCTCA (SEQ ID NO: 3526) |
| | | | particle 72 kDa | | GTATCTGAGTTGCATACCAGGCAGT (SEQ ID NO: 3527) |
| | | | | | CTAACAGGTCTGTTTGGCCCATTGA (SEQ ID NO: 3528) |
| | | | | | CTGTTTGGCCCATTGATAGATACTC (SEQ ID NO: 3529) |
| | | | | | TGGTGTCTCCTTCTGGTTATGGATT (SEQ ID NO: 3530) |
| | | | | | ATTTTGACCATTGATTACCTTTCTC (SEQ ID NO: 3531) |
| | | | | | GTCTTTCCTTGCTTACAAACTACTT (SEQ ID NO: 3532) |
| | | | | | AACTACTTTCACATTGAACAGCTGT (SEQ ID NO: 3533) |
| | | | | | GTATTCATTTTATGCTGCCCAAGAT (SEQ ID NO: 3534) |
| | | | | | GTGATTATATTACTCTGTCCTTGTT (SEQ ID NO: 3535) |
| | | | | | TAAAGTGCTGCTGTGTTTGACTCTG (SEQ ID NO: 3536) |
| 210378_s_at | SSNA1 | N14, NA-14, | Sjogren syndrome | 8636 | AGCGTTCTCAAGAGGGAAGCTGGGA (SEQ ID NO: 3537) |
| | | NA14 | nuclear autoantigen 1 | | TGGGAACCTGACCAAGGCTACAGCC (SEQ ID NO: 3538) |
| | | | | | GACCAGAAAAGTAGCGGCGGCAGGG (SEQ ID NO: 3539) |
| | | | | | GCCCCAGCAAGTGTGTGCTCAGAGC (SEQ ID NO: 3540) |
| | | | | | TGCTCAGAGCATCTTTGTTCTTCAC (SEQ ID NO: 3541) |
| | | | | | CAGGTGCCGAGAGGGGCAGGTGCCA (SEQ ID NO: 3542) |
| | | | | | CTTCATGCTCACACAGGCTATGGGG (SEQ ID NO: 3543) |
| | | | | | CTGCAAGGGGCTTGTCTCTGTGGCA (SEQ ID NO: 3544) |
| | | | | | TGCCAGGGAGGCTCTGGTTGTCTGA (SEQ ID NO: 3545) |
| | | | | | TGGTTGTCTGAGCACCATGGGGGCC (SEQ ID NO: 3546) |
| | | | | | CCTGTGGCCTGTGATTATGAATAAA (SEQ ID NO: 3547) |
| 210242_x_at | ST20 | HCCS-1 | suppressor of | 400410 | GCCATTACCAATCGCGAAACCCGAA (SEQ ID NO: 3548) |
| | | | tumorigenicity 20 | | TGAGGAGGCGGTTCATCTGTGGCCA (SEQ ID NO: 3549) |
| | | | | | GGCCCTGCTATATGCGGGGGCCTCG (SEQ ID NO: 3550) |
| | | | | | CGGCTGGAGTGAGCGGCGTGGACGC (SEQ ID NO: 3551) |
| | | | | | TTCCCTTGTTGCTGCGAGAGCGAGA (SEQ ID NO: 3552) |
| | | | | | TAACGTGAACGCGGACCAGGAGGCT (SEQ ID NO: 3553) |
| | | | | | CTCTGTCTCCCAGGTTCAGGAAAAT (SEQ ID NO: 3554) |
| | | | | | AATCTGGCTGGATGACTTTTCTAGA (SEQ ID NO: 3555) |
| | | | | | TCTGTGAAATGCTCTTCTGTCCTGA (SEQ ID NO: 3556) |
| | | | | | GCCTAATTTTTCTGACTCTTACGAA (SEQ ID NO: 3557) |
| | | | | | TTGCCAACACATACTTCTACTTTTA (SEQ ID NO: 3558) |
| 204068_at | STK3 | FLJ90748, KRS1, | serine/threonine | 6788 | ATAGATCTATCGTGTTTAAAACCAA (SEQ ID NO: 3559) |
| | | MST2 | kinase 3 (STE20 | | GAAATCAATGGAACCCTTGCACAAA (SEQ ID NO: 3560) |
| | | | homolog, yeast) | | AAACTGTAATAAGCTCATCAATTTC (SEQ ID NO: 3561) |
| | | | | | AATGTGCTCTGTTGTCACAGGATGT (SEQ ID NO: 3562) |
| | | | | | ATTTCCTGGGAATTGGTAAACATCA (SEQ ID NO: 3563) |
| | | | | | GTTCCTGATGATAACCCAGTAGCAA (SEQ ID NO: 3564) |
| | | | | | GAGTGGTACAAGCCTTGGGGACTGA (SEQ ID NO: 3565) |
| | | | | | AAAGAAACTCATTTTTACGCTGAAT (SEQ ID NO: 3566) |
| | | | | | GCATTGGGACCAGTCATTTCCTAAG (SEQ ID NO: 3567) |
| | | | | | ATTTCCTAAGCTACATATGGCCATC (SEQ ID NO: 3568) |
| | | | | | TATGGCCATCTTGACAGTGTTTTTT (SEQ ID NO: 3569) |
| 204287_at | SYNGR1 | MGC: 1939 | synaptogyrin 1 | 9145 | TGAGGGGCTAATTCCCAGGGGACTG (SEQ ID NO: 3570) |
| | | | | | CTTCCCTGGTGATTCTTGATCTTCA (SEQ ID NO: 3571) |
| | | | | | TCAAAGCCTCGGGGATCCCAGGTTT (SEQ ID NO: 3572) |
| | | | | | GGTTTCCCCATGTAACTGAGACACC (SEQ ID NO: 3573) |
| | | | | | CCCCTTTGATTCTCTAAGGAGCACG (SEQ ID NO: 3574) |
| | | | | | ATGCCCCTCCCAGGAGTTTATGGGA (SEQ ID NO: 3575) |
| | | | | | GCAGCGTTACTGCCTGTGTATAGTA (SEQ ID NO: 3576) |
| | | | | | CGTGTGTGTGCGGTGAAGGGCGGTC (SEQ ID NO: 3577) |
| | | | | | CCCACCACCTGGTTAAGTCTCGAGT (SEQ ID NO: 3578) |
| | | | | | AAGTCTCGAGTGAATCCAGTGGCCC (SEQ ID NO: 3579) |
| | | | | | GACATCCATCCATCTGTGGTGAACC (SEQ ID NO: 3580) |
| 218746_at | TAPBPL | TAPBPR; | TAP binding protein- | 55080 | CTCATCTGCGACATTGCTGGCTATT (SEQ ID NO: 3581) |
| | | TAPBP-R; | like | | TCTGCGACATTGCTGGCTATTACCC (SEQ ID NO: 3582) |
| | | FLJ10143 | | | TGGTGACGTGGACCCGAGAGGAGCT (SEQ ID NO: 3583) |
| | | | | | CGTGGACCCGAGAGGAGCTGGGTGG (SEQ ID NO: 3584) |
| | | | | | TCTCCAGCCTCAGGCAAAGCGTGGC (SEQ ID NO: 3585) |
| | | | | | GCCTCAGGCAAAGCGTGGCAGGCAC (SEQ ID NO: 3586) |
| | | | | | GCAGGTGCCACTTACACCTGCCAGG (SEQ ID NO: 3587) |
| | | | | | CACTTACACCTGCCAGGTCACACAC (SEQ ID NO: 3588) |
| | | | | | CCATGAAGACCGCACAGCGCGTGTA (SEQ ID NO: 3589) |
| | | | | | CCAGCTGACCTAAAGCGACATGAGA (SEQ ID NO: 3590) |
| | | | | | AACAACAACCAAGCCAGTTTAATGG (SEQ ID NO: 3591) |
| 218747_s_at | TAPBPL | TAPBPR; | TAP binding protein- | 55080 | GTCACACACATCTCTCTGGAGGAGC (SEQ ID NO: 3592) |
| | | TAPBP-R; | like | | GAGCGGAGAACAGCCTTGGGAGTCA (SEQ ID NO: 3593) |
| | | FLJ10143 | | | GAACAGCCTTGGGAGTCATCTTTGC (SEQ ID NO: 3594) |
| | | | | | AGCCTTGGGAGTCATCTTTGCCAGC (SEQ ID NO: 3595) |
| | | | | | GGGGCTTCAGAGACGGCAAGCACCT (SEQ ID NO: 3596) |
| | | | | | CAGAGACGGCAAGCACCTACAGGAC (SEQ ID NO: 3597) |
| | | | | | AGCACCTACAGGACTTGGGCTGCTT (SEQ ID NO: 3598) |
| | | | | | GCTTCAGGCTGAACGCTGGGAGACC (SEQ ID NO: 3599) |
| | | | | | CAGGCTGAACGCTGGGAGACCACTT (SEQ ID NO: 3600) |
| | | | | | AAGCGACATGAGACTACTAGAAAGA (SEQ ID NO: 3601) |
| | | | | | GACTACTAGAAAGAAACGACACCCT (SEQ ID NO: 3602) |
| 200803_s_at | TEGT | BI-1, TMBIM6 | testis enhanced gene | 7009 | CTTGCTGGATTTGCATTCCTTACAG (SEQ ID NO: 3603) |
| | | | transcript (BAX | | CCCTGCCCTGGAGTTTTGTATTGCT (SEQ ID NO: 3604) |
| | | | inhibitor 1) | | TGTATTGCTGTCAACCCCAGCATCC (SEQ ID NO: 3605) |
| | | | | | TCCCACTGCTTTCATGGGCACAGCA (SEQ ID NO: 3606) |
| | | | | | AGCAATGATCTTTACCTGCTTCACC (SEQ ID NO: 3607) |
| | | | | | TGATGTCAGCCCTGAGCTTGTTGCT (SEQ ID NO: 3608) |
| | | | | | GGGACTGGTGGTCATGTGTGGCTTC (SEQ ID NO: 3609) |
| | | | | | TATCTGGCACTGCATTGATCTCTTC (SEQ ID NO: 3610) |
| | | | | | GAAAACTCATGATGATCCTGGCCAT (SEQ ID NO: 3611) |
| | | | | | AAATGAAGTGACCATCCAGCCTTTC (SEQ ID NO: 3612) |
| | | | | | ATTTCCTTTTTGCACACATTACAGG (SEQ ID NO: 3613) |
| 200804_at | TEGT | BI-1, TMBIM6 | testis enhanced gene | 7009 | GACAGCTACCCCCAGAAGGGTCAAT (SEQ ID NO: 3614) |
| | | | transcript (BAX | | GTTGGGAGTGGTTGTGGCTCTGAGC (SEQ ID NO: 3615) |
| | | | inhibitor 1) | | TGCTCTACAGAGCTTCAGTGTGAGA (SEQ ID NO: 3616) |
| | | | | | TTCACAACCAGTGCACAGTTTGACA (SEQ ID NO: 3617) |
| | | | | | TTGACAGTGGCCTCAGGTTCACAGT (SEQ ID NO: 3618) |
| | | | | | AGTGCACCATGTCACTGTGCTATCC (SEQ ID NO: 3619) |
| | | | | | CCCGAATGGCTCACTTTCACTGAGG (SEQ ID NO: 3620) |
| | | | | | TGCTGTCCTCTGATTTAGCTGCTGC (SEQ ID NO: 3621) |
| | | | | | CAGCCTCTGGCTTGAGAACTTACTA (SEQ ID NO: 3622) |
| | | | | | GTGATTCTCTGCTAGGCCTAAGATT (SEQ ID NO: 3623) |
| | | | | | AACATCTCTTGAAGCCAAACTCCAC (SEQ ID NO: 3624) |
| 202720_at | TES | DKFZp586B2022, | testis derived | 26136 | GTATAGATGATTTTTGGCTTGGACA (SEQ ID NO: 3625) |
| | | MGC1146, | transcript (3 LIM | | GGACATAAAAGCCAAGCCACCCATT (SEQ ID NO: 3626) |
| | | TESS, TESS-2 | domains) | | AGCCACCCATTTGCTTTTAATCCAA (SEQ ID NO: 3627) |
| | | | | | GAACATGTATAGTTTTTGTACCCAG (SEQ ID NO: 3628) |
| | | | | | TATTGATTGCACTTGCCTGCCATGA (SEQ ID NO: 3629) |
| | | | | | GCACTTGCCTGCCATGATTTAGATA (SEQ ID NO: 3630) |
| | | | | | TATTCTTTCCTAATGGATCCTGTTT (SEQ ID NO: 3631) |
| | | | | | ATACTTCCAAGCCTGTCCATGGATA (SEQ ID NO: 3632) |
| | | | | | TGTCTTCACTTGTATGTTTTCATGG (SEQ ID NO: 3633) |
| | | | | | ATGTTTTCATGGCTAGGTATTTCTA (SEQ ID NO: 3634) |
| | | | | | TGTACTTCTACACATAGCTATGCAC (SEQ ID NO: 3635) |
| 218099_at | TEX2 | DKFZp781G0721, | testis expressed 2 | 55852 | TGACAGGATGGGTCCTCTCATACAG (SEQ ID NO: 3636) |
| | | HT008, | | | TTTTTCCATCTGGCGTTTCTGTGTC (SEQ ID NO: 3637) |
| | | KIAA1738, | | | GTTTCTGTGTCCTCCAGGTTTATAT (SEQ ID NO: 3638) |
| | | TMEM96 | | | GGGAGAGTTCCATGGGCAGATTTCC (SEQ ID NO: 3639) |
| | | | | | GAAGGCCAAAACGGAGAACTGCTCT (SEQ ID NO: 3640) |
| | | | | | AGACCAAAAGTTTGCTCAGCATCAC (SEQ ID NO: 3641) |
| | | | | | TCAGCATCACACTACATCTCAAAAT (SEQ ID NO: 3642) |
| | | | | | TAGTTTACAAGGTTGGGGGCTCTCT (SEQ ID NO: 3643) |
| | | | | | GGGCTCTCTTTGCTTCGAGAAGTAA (SEQ ID NO: 3644) |
| | | | | | GCTGCATTCAACGTCAAAATTACCT (SEQ ID NO: 3645) |
| | | | | | GCACCTTGCCTGAACATGACTTTAA (SEQ ID NO: 3646) |
| 213135_at | TIAM1 | FLJ36302 | T-cell lymphoma | 7074 | GTTCAGTACATCATGCTCTTGTGCC (SEQ ID NO: 3647) |
| | | | invasion and | | TTTCCAGGGCTTCGAGCTTGATCTT (SEQ ID NO: 3648) |
| | | | metastasis 1 | | TTGCTATATCTTCTGGTTTTCTGAA (SEQ ID NO: 3649) |
| | | | | | ATACCCTTTGTATCACTGCATTTTT (SEQ ID NO: 3650) |
| | | | | | CATTTTTCCATATCATCTCCGGTTC (SEQ ID NO: 3651) |
| | | | | | GGTTCGATCGCGTCCAGATGGAAAA (SEQ ID NO: 3652) |
| | | | | | AGCAGAGGCTTCTAATCGTCGCATT (SEQ ID NO: 3653) |
| | | | | | CGTCGCATTTACTGGCTCCAGTGCA (SEQ ID NO: 3654) |
| | | | | | CTCCAGTGCAACACATCCATCTGAA (SEQ ID NO: 3655) |
| | | | | | AACACTCGGAAGTCTGGTGCTTGGA (SEQ ID NO: 3656) |
| | | | | | GAGAGGGTGCCATTGTCTCTTGTAC (SEQ ID NO: 3657) |
| 219258_at | TIPIN | FLJ20516 | TIMELESS | 54962 | GAACATGATGTCACTTCTACTGAAT (SEQ ID NO: 3658) |
| | | | interacting protein | | CTACTGAATTAGATCCCTTTCTGAC (SEQ ID NO: 3659) |
| | | | | | GATCCCTTTCTGACAAACTTATCTG (SEQ ID NO: 3660) |
| | | | | | GTTAATGAATACACCCAGGGCACAC (SEQ ID NO: 3661) |
| | | | | | CCCAGGGCACACACGGTTGAAGAGG (SEQ ID NO: 3662) |
| | | | | | AACGAAGACATTCTGGACAATCCAT (SEQ ID NO: 3663) |
| | | | | | GAAACACTGCTGGACCAGTCTTTTA (SEQ ID NO: 3664) |
| | | | | | GCAACAGCAACTTGATGCTACATCC (SEQ ID NO: 3665) |
| | | | | | TGTATCTGTTAAGTCATCGTCCTGC (SEQ ID NO: 3666) |
| | | | | | TTAAGTCATCGTCCTGCAAGCTTGG (SEQ ID NO: 3667) |
| | | | | | GCAAGCTTGGCGTTACTATGTATTT (SEQ ID NO: 3668) |
| 203254_s_at | TLN1 | ILWEQ, | talin 1 | 7094 | GAAGATGGTTGGCGGCATTGCCCAG (SEQ ID NO: 3669) |
| | | KIAA1027, TLN | | | TGGTTGGCGGCATTGCCCAGATCAT (SEQ ID NO: 3670) |
| | | | | | TGCCCAGATCATCGCAGCACAGGAA (SEQ ID NO: 3671) |
| | | | | | AATGCTTCGGAAGGAACGAGAGCTG (SEQ ID NO: 3672) |
| | | | | | GAAGAGGCGCGGAAGAAACTGGCCC (SEQ ID NO: 3673) |
| | | | | | CCGGCAGCAGCAGTACAAGTTTCTG (SEQ ID NO: 3674) |
| | | | | | GTACAAGTTTCTGCCTTCAGAGCTT (SEQ ID NO: 3675) |
| | | | | | GAGCTTCGAGATGAGCACTAAAGAA (SEQ ID NO: 3676) |
| | | | | | CTTCTATTTAATGCAGACCCGGCCC (SEQ ID NO: 3677) |
| | | | | | CTCCAAGAGTATTATTAACGCTGCT (SEQ ID NO: 3678) |
| | | | | | TTATTAACGCTGCTGTACCTCGATC (SEQ ID NO: 3679) |
| 209387_s_at | TM4SF1 | H-L6, L6, M3S1, | transmembrane 4 L | 4071 | TTGGCTCTTGGTGGAATTGAATTCA (SEQ ID NO: 3680) |
| | | TAAL6 | six family member 1 | | GAATTGAATTCATCTTGTGTCTTAT (SEQ ID NO: 3681) |
| | | | | | ATTCATCTTGTGTCTTATTCAAGTA (SEQ ID NO: 3682) |
| | | | | | GTAATAAATGGAGTGCTTGGAGGCA (SEQ ID NO: 3683) |
| | | | | | GGAGTGCTTGGAGGCATATGTGGCT (SEQ ID NO: 3684) |
| | | | | | GAGGCATATGTGGCTTTTGCTGCTC (SEQ ID NO: 3685) |
| | | | | | CTTTTGCTGCTCTCACCAACAGCAA (SEQ ID NO: 3686) |
| | | | | | TCCCCACAGTCTACTTTTACAAACG (SEQ ID NO: 3687) |
| | | | | | TTTACAGACTGAGTGACAGTACTCA (SEQ ID NO: 3688) |
| | | | | | GAGTGACAGTACTCAGTATATCTGA (SEQ ID NO: 3689) |
| | | | | | TATATCTGAGATAAACTCTATAATG (SEQ ID NO: 3690) |
| 215033_at | TM4SF1 | H-L6, L6, M3S1, | transmembrane 4 L | 4071 | AAGGTTACCCACATTGAGCTCATAC (SEQ ID NO: 3691) |
| | | TAAL6 | six family member 1 | | GAGCTCATACCAGTGTGAAACTTCC (SEQ ID NO: 3692) |
| | | | | | GAAACTTCCATGGCATTATCTTTTA (SEQ ID NO: 3693) |
| | | | | | ACCCCACACAAATGCACTCAAAGCA (SEQ ID NO: 3694) |
| | | | | | AAAGCAACCCAACATCAGTATCCTG (SEQ ID NO: 3695) |
| | | | | | TGCAGTTTCTATGGGCCCTTTCTGC (SEQ ID NO: 3696) |
| | | | | | TTCTGCAGCCTTTACTCATGGAAGA (SEQ ID NO: 3697) |
| | | | | | AGCATTGTCCAAGCCCTAAGTATGG (SEQ ID NO: 3698) |
| | | | | | GTATGGTTGGCCTAAGCTTTGCTGA (SEQ ID NO: 3699) |
| | | | | | AGATCAGTCTGTTTATGTTTGCTTA (SEQ ID NO: 3700) |
| | | | | | AATGTCATCGTTATTTATCCTGATT (SEQ ID NO: 3701) |
| 215034_s_at | TM4SF1 | H-L6, L6, M3S1, | transmembrane 4 L | 4071 | TATGACTGCTAAAAGAACCAACCCA (SEQ ID NO: 3702) |
| | | TAAL6 | six family member 1 | | AAAGAACCAACCCAGGACAGAGCCA (SEQ ID NO: 3703) |
| | | | | | ACCCAGGACAGAGCCACAATCTTCC (SEQ ID NO: 3704) |
| | | | | | CAGGACAGAGCCACAATCTTCCTCT (SEQ ID NO: 3705) |
| | | | | | ACAGAGCCACAATCTTCCTCTATTT (SEQ ID NO: 3706) |
| | | | | | TTTCACTTGTATTCATTTGTAAAAC (SEQ ID NO: 3707) |
| | | | | | TTTGTATTAGTGTAACATACTCCCC (SEQ ID NO: 3708) |
| | | | | | AAACGCCTGTAAAGACTGGCATCTT (SEQ ID NO: 3709) |
| | | | | | GCCTGTAAAGACTGGCATCTTCACA (SEQ ID NO: 3710) |
| | | | | | GACTGGCATCTTCACAGGATGTCAG (SEQ ID NO: 3711) |
| | | | | | ATCTTCACAGGATGTCAGTGTTTAA (SEQ ID NO: 3712) |
| 213349_at | TMCC1 | DKFZp686M0169, | transmembrane and | 23023 | GATGAGGGCAAACCAGTTAAACCTA (SEQ ID NO: 3713) |
| | | FLJ42680 | coiled-coil domain | | TCCCTATCCCAGACTAACTTTACTG (SEQ ID NO: 3714) |
| | | | family 1 | | TGGATTCGGGGTGGATTTTCGTTGT (SEQ ID NO: 3715) |
| | | | | | GTGGATTTTCGTTGTCCGTGGAAGA (SEQ ID NO: 3716) |
| | | | | | GGAAGAACACATGGATCTCTCTGGC (SEQ ID NO: 3717) |
| | | | | | CTGCCCCTTAACCTTGACGAGGATA (SEQ ID NO: 3718) |
| | | | | | CCCCCAAAGGATCACTGCACAGTCC (SEQ ID NO: 3719) |
| | | | | | ATCACTGCACAGTCCTACTACAGTA (SEQ ID NO: 3720) |
| | | | | | ATATGTGTATAGTTACCAACCTAAA (SEQ ID NO: 3721) |
| | | | | | AAAATCCGAACAGCATACTTGAAGA (SEQ ID NO: 3722) |
| | | | | | AATACTCAAACTCTCAGTGCTTCCT (SEQ ID NO: 3723) |
| 201764_at | TMEM106C | MGC111210, | transmembrane | 79022 | CTACCCCCACGTGGTGTAAGCAGAG (SEQ ID NO: 3724) |
| | | MGC5576 | protein 106C | | GAATTGGTTCACTTAACTCCCAGCA (SEQ ID NO: 3725) |
| | | | | | AAACATCCTCCTGCCACTTAGGAGG (SEQ ID NO: 3726) |
| | | | | | AACACCTCCCTATGGTACCATTTAT (SEQ ID NO: 3727) |
| | | | | | AGCAGAATCAGTGCCTAGCCTGTGC (SEQ ID NO: 3728) |
| | | | | | TGAGTGACCTGCAGGCCATTATCAG (SEQ ID NO: 3729) |
| | | | | | GCCATTATCAGTGCCTCATCTGTGC (SEQ ID NO: 3730) |
| | | | | | GAGAGGGACCATCCAAATACCTAAG (SEQ ID NO: 3731) |
| | | | | | TTTCAGCTGTTCCCAAAGGCCTGGG (SEQ ID NO: 3732) |
| | | | | | ATGTGGGGCTTGATTCACCCTTCAT (SEQ ID NO: 3733) |
| | | | | | TTCACCCTTCATCCATTGGCTGGAA (SEQ ID NO: 3734) |
| 202475_at | TMEM147 | MGC1936, | transmembrane | 10430 | AAGGCGGCATCTATGACTTCATTGG (SEQ ID NO: 3735) |
| | | NIFIE14 | protein 147 | | CCTTGTCATGTCCCGGAATGCCGGC (SEQ ID NO: 3736) |
| | | | | | TGCTGAGCTTATTATGTCCCGCTGC (SEQ ID NO: 3737) |
| | | | | | AGCCCGGGGCATTGAGTTTGACTGG (SEQ ID NO: 3738) |
| | | | | | ATCAGTCTGGGTCCATACATCGTCG (SEQ ID NO: 3739) |
| | | | | | CGCGTCTGCTCAGGTCTGGATGATA (SEQ ID NO: 3740) |
| | | | | | TAACACGCTATGATCTGTACCACAC (SEQ ID NO: 3741) |
| | | | | | CTCCTGCTGATGTTCCTCAGAGTTT (SEQ ID NO: 3742) |
| | | | | | TATGGAGACGTTTGTCCACCTATGC (SEQ ID NO: 3743) |
| | | | | | TTGCCGTTGTCAATGTGCACTCCTA (SEQ ID NO: 3744) |
| | | | | | TCCTAGGCTTGGTGTCTCAGACATT (SEQ ID NO: 3745) |
| 218804_at | TMEM16A | FLJ10261, | transmembrane | 55107 | CACCAAGCCGACCTCAGAGTTGTTC (SEQ ID NO: 3746) |
| | | ORAOV2, | protein 16A | | AGAGTTGTTCATCTTCCTTATGGGA (SEQ ID NO: 3747) |
| | | TAOS2, | | | TATGGGACAAAACCGGTTGACCAGA (SEQ ID NO: 3748) |
| | | TMEM16A | | | GAGAGATGACCTCGGAAGCATTTCC (SEQ ID NO: 3749) |
| | | | | | GCATTTCCACAGATGGTGTCAGGGT (SEQ ID NO: 3750) |
| | | | | | TCCCCTGGAAGCTTTAGAATATTTA (SEQ ID NO: 3751) |
| | | | | | GGATTTTTTTTCTGTAGCTCAAAGG (SEQ ID NO: 3752) |
| | | | | | ATTTTGGTAACACTTCTCTATATTT (SEQ ID NO: 3753) |
| | | | | | GCAATGATACTAAACAACTCTCTGA (SEQ ID NO: 3754) |
| | | | | | AACTCTCTGAAATTTCTCAAGCACC (SEQ ID NO: 3755) |
| | | | | | AACATCATTTTAGCAAAGGCCAGGA (SEQ ID NO: 3756) |
| 218465_at | TMEM33 | 1600019D15Rik, | transmembrane | 55161 | GCATTTCAGTCTCAACGCATAGATA (SEQ ID NO: 3757) |
| | | FLJ10525, | protein 33 | | AAATCCTGTTCATTGAACTCCCATC (SEQ ID NO: 3758) |
| | | SHINC3 | | | GAACTCCCATCAACTCTTATGAAAT (SEQ ID NO: 3759) |
| | | | | | TCATGCTGATCTTCATTACCGTTGC (SEQ ID NO: 3760) |
| | | | | | TTGTGACCAGTTTCTGTCTGCATGT (SEQ ID NO: 3761) |
| | | | | | GTCTGCATGTAATTTGGATTTCTCA (SEQ ID NO: 3762) |
| | | | | | TATTTTTGTTCATCTCCTTATCTAT (SEQ ID NO: 3763) |
| | | | | | TTTGTAATATTTGTCCACTAAGCTG (SEQ ID NO: 3764) |
| | | | | | AAGCAGCCTCATACAGTTGATTTTG (SEQ ID NO: 3765) |
| | | | | | GTTGATTTTGTGTATGTGGCTAGTC (SEQ ID NO: 3766) |
| | | | | | GTGGCTAGTCTTATTGTCACTATGT (SEQ ID NO: 3767) |
| 212204_at | TMEM87A | DKFZp564G2022 | transmembrane | 25963 | GCTTAACTCTTTTGACATCTGCTAT (SEQ ID NO: 3768) |
| | | | protein 87A | | TATTGTGACACATCCCATTGCTGGC (SEQ ID NO: 3769) |
| | | | | | GGTGCACACTCCGAAACTTTTAACT (SEQ ID NO: 3770) |
| | | | | | ACTACTGTTTTGTAAGCCTCCAAGG (SEQ ID NO: 3771) |
| | | | | | GCCTCCAAGGGTGGCATTGCAGGGT (SEQ ID NO: 3772) |
| | | | | | GAGAGGTGCTCCAAGTGCTGTGATT (SEQ ID NO: 3773) |
| | | | | | GAGCACCGTGCTAGAGGAACTGTAA (SEQ ID NO: 3774) |
| | | | | | ATGAAGTAGCGTGGAGGCCCTGGAC (SEQ ID NO: 3775) |
| | | | | | ACTGCTGCTCGTTCTTTAGGATGGA (SEQ ID NO: 3776) |
| | | | | | GGACTGTTCTGGTATCTGGTATTGG (SEQ ID NO: 3777) |
| | | | | | GAAGCACTCTATTTCTGTTTTAATG (SEQ ID NO: 3778) |
| 218419_s_at | TMUB2 | FP2653, | transmembrane and | 79089 | TCTCAGCCAAATACTCATCTTTTGA (SEQ ID NO: 3779) |
| | | MGC3123 | ubiquitin-like domain | | CTGAAATCACACTGGCGGGAATGAA (SEQ ID NO: 3780) |
| | | | containing 2 | | GGCGGGAATGAAGATTGTGCCAGCC (SEQ ID NO: 3781) |
| | | | | | AGCAGGAATAGGGTGTCCTCCCTTC (SEQ ID NO: 3782) |
| | | | | | AAGCACTTTGCTTGCATTTTATTTT (SEQ ID NO: 3783) |
| | | | | | GAGTCCTTCATAGAGCTCAGTCAGG (SEQ ID NO: 3784) |
| | | | | | GGGATGGGGCACCAAGCCAAGCCCC (SEQ ID NO: 3785) |
| | | | | | TCCTCAGGCTGTAAGCAAGAGACAG (SEQ ID NO: 3786) |
| | | | | | CCTGCCCAACTCCAAGGACTGGGTA (SEQ ID NO: 3787) |
| | | | | | GGGCTATTGGAGGGTCAGTGTCTGT (SEQ ID NO: 3788) |
| | | | | | AGTGTCTGTGACTGAATAAAGTTCC (SEQ ID NO: 3789) |
| 209294_x_at | TNFRSF10B | CD262, DR5, | tumor necrosis factor | 8795 | GGTGATCCCACTGAGACTCTGAGAC (SEQ ID NO: 3790) |
| | | KILLER, | receptor superfamily, | | ATGACTTTGCAGACTTGGTGCCCTT (SEQ ID NO: 3791) |
| | | KILLER/DR5, | member 10b | | ACTCCTGGGAGCCGCTCATGAGGAA (SEQ ID NO: 3792) |
| | | TRAIL-R2, | | | GGACACCTTGTACACGATGCTGATA (SEQ ID NO: 3793) |
| | | TRAILR2, | | | CAAAACCGGGCGAGATGCCTCTGTC (SEQ ID NO: 3794) |
| | | TRICK2, | | | GAGGACCACTTGTTGAGCTCTGGAA (SEQ ID NO: 3795) |
| | | TRICK2A, | | | AATGCAGACTCTGCCATGTCCTAAG (SEQ ID NO: 3796) |
| | | TRICK2B, | | | CAGGAAGTCAGACCTTCCCTGGTTT (SEQ ID NO: 3797) |
| | | TRICKB, | | | GGAAAAAGCCCAACTGGACTCCAGT (SEQ ID NO: 3798) |
| | | ZTNFR9 | | | GGTACTGGAAGAAACTCTCCCATCC (SEQ ID NO: 3799) |
| | | | | | CATCCTGTAACTTTTCACTGCACTT (SEQ ID NO: 3800) |
| 207037_at | TNFRSF11A | CD265, FEO, | tumor necrosis factor | 8792 | GCCTGCTTTACGTATTTTCTTTTGT (SEQ ID NO: 3801) |
| | | LOH18CR1, | receptor superfamily, | | TGCCCCTGCTCACAGTGTTTTAGAG (SEQ ID NO: 3802) |
| | | ODFR, OFE, | member 11a, NFKB | | GTTTTAGAGATGGCTTTCCCAGTGT (SEQ ID NO: 3803) |
| | | OSTS, PDB2, | activator | | GTGAGGCCTGGAGATAGTTGCTAAG (SEQ ID NO: 3804) |
| | | RANK, | | | GAAACCCGATTTATTTCTCCTGAAT (SEQ ID NO: 3805) |
| | | TRANCER | | | AAGTTTGTGTCGTTCCTTAAGCAGA (SEQ ID NO: 3806) |
| | | | | | TGACCTTACCCGCTAGGTGGTTAAT (SEQ ID NO: 3807) |
| | | | | | GGTGGTTAATTTATCCATGCTGGCA (SEQ ID NO: 3808) |
| | | | | | GCAGAGGCACTCAGGTACTTGGTAA (SEQ ID NO: 3809) |
| | | | | | CAAGTTGCTGCAGCTTGGCATTCTT (SEQ ID NO: 3810) |
| | | | | | TTCTTCTTATTCTAGAGGTCTCTCT (SEQ ID NO: 3811) |
| 211841_s_at | TNFRSF25 | RP4-650H14.2, | tumor necrosis factor | 8718 | AGTGAGAAGATCTGCACCGTCCAGT (SEQ ID NO: 3812) |
| | | APO-3, DDR3, | receptor superfamily, | | TGCACCGTCCAGTTGGTGGGTAACA (SEQ ID NO: 3813) |
| | | DR3, LARD, | member 25 | | TGCCCGCAGGTGACATGGTCCTGGG (SEQ ID NO: 3814) |
| | | TNFRSF12, TR3, | | | ACATGGTCCTGGGACCAGTTGCCCA (SEQ ID NO: 3815) |
| | | TRAMP, WSL-1, | | | CGCTGGAAGGAGTTCGTGCGCACGC (SEQ ID NO: 3816) |
| | | WSL-LR | | | GCTGGGGCTGCGCGAGGCAGAGATC (SEQ ID NO: 3817) |
| | | | | | GCAGAGATCGAAGCCGTGGAGGTGG (SEQ ID NO: 3818) |
| | | | | | CTTCCGAGACCAGCAGTACGAGATG (SEQ ID NO: 3819) |
| | | | | | GCCCTGGAGCGCATGGGGCTGGACG (SEQ ID NO: 3820) |
| | | | | | GCTGGACGGCTGCGTGGAAGACTTG (SEQ ID NO: 3821) |
| | | | | | TGCGTGGAAGACTTGCGCAGCCGCC (SEQ ID NO: 3822) |
| 202687_s_at | TNFSF10 | APO2L, Apo-2L, | tumor necrosis factor | 8743 | GTAGCAGCTCACATAACTGGGACCA (SEQ ID NO: 3823) |
| | | CD253, TL2, | (ligand) superfamily, | | CATTGTCTTCTCCAAACTCCAAGAA (SEQ ID NO: 3824) |
| | | TRAIL | member 10 | | TGGGCCGCAAAATAAACTCCTGGGA (SEQ ID NO: 3825) |
| | | | | | GGGCATTCATTCCTGAGCAACTTGC (SEQ ID NO: 3826) |
| | | | | | TTTTACTACATCTATTCCCAAACAT (SEQ ID NO: 3827) |
| | | | | | TCCCAAACATACTTTCGATTTCAGG (SEQ ID NO: 3828) |
| | | | | | AATACACAAGTTATCCTGACCCTAT (SEQ ID NO: 3829) |
| | | | | | GGACTCTATTCCATCTATCAAGGGG (SEQ ID NO: 3830) |
| | | | | | TGAGCACTTGATAGACATGGACCAT (SEQ ID NO: 3831) |
| | | | | | GGACCATGAAGCCAGTTTTTTCGGG (SEQ ID NO: 3832) |
| | | | | | GCCTTTTTAGTTGGCTAACTGACCT (SEQ ID NO: 3833) |
| 211828_s_at | TNIK | | TRAF2 and NCK | 23043 | GAAATATATGCTTGGGCTCCTAAAC (SEQ ID NO: 3834) |
| | | | interacting kinase | | AAGTCTTTTGCAGATCTCCAGCACA (SEQ ID NO: 3835) |
| | | | | | GCACAAGCCTCTGCTAGTTGATCTC (SEQ ID NO: 3836) |
| | | | | | GGTTCACACACTGGTTTCCATGTAA (SEQ ID NO: 3837) |
| | | | | | CATACCATCTCATATTCAGGGCAAT (SEQ ID NO: 3838) |
| | | | | | TTCAGGGCAATATCACTCCTCATGC (SEQ ID NO: 3839) |
| | | | | | CCTCATGCTATTGTCATCTTGCCTA (SEQ ID NO: 3840) |
| | | | | | GTAAACACCTATGGCCGGATAACTA (SEQ ID NO: 3841) |
| | | | | | GTCTGTGGCCTACATTCATTCCAAT (SEQ ID NO: 3842) |
| | | | | | GGTATTTTTTGCATCCGTGCGATCT (SEQ ID NO: 3843) |
| | | | | | TAGCCAAGTGTTTTTCATGACCCTC (SEQ ID NO: 3844) |
| 213107_at | TNIK | | TRAF2 and NCK | 23043 | AATCAGCAAGATATCCTCCTCATGG (SEQ ID NO: 3845) |
| | | | interacting kinase | | GGTCCCTTTAGCTCTCAAAAGCAAT (SEQ ID NO: 3846) |
| | | | | | TCCTGTTCTCATTTTTACTGCTGTG (SEQ ID NO: 3847) |
| | | | | | CATTTTTACTGCTGTGGTTGTGCTG (SEQ ID NO: 3848) |
| | | | | | GCTGCTGAACAATACTATCTTCTCA (SEQ ID NO: 3849) |
| | | | | | AATTCCATGCCACAAATTCAGCAAT (SEQ ID NO: 3850) |
| | | | | | ACTGTAATTGGATGCTGATGTGGAC (SEQ ID NO: 3851) |
| | | | | | CACTCCCGAATGTGATTGCCACCAG (SEQ ID NO: 3852) |
| | | | | | GATTGCCACCAGCTCTTTATATTGC (SEQ ID NO: 3853) |
| | | | | | GCTCTTTATATTGCTGCTGTGGTAT (SEQ ID NO: 3854) |
| | | | | | TGCAGTCTTGTTTACAGTATGTACA (SEQ ID NO: 3855) |
| 213109_at | TNIK | | TRAF2 and NCK | 23043 | AACTCATGTGGACTTATGCCAGTCT (SEQ ID NO: 3856) |
| | | | interacting kinase | | TTGGTTGAACATATCGCTTTCCCTT (SEQ ID NO: 3857) |
| | | | | | TCCCAGTACAGTCCATCTTTCAATG (SEQ ID NO: 3858) |
| | | | | | ATCTTTCAATGTTGCAGCCTGGTTG (SEQ ID NO: 3859) |
| | | | | | GGCAGGAATTTCCAGGAGATCCCCA (SEQ ID NO: 3860) |
| | | | | | TCCCCAAGAATGCTGCCTTGTCTGT (SEQ ID NO: 3861) |
| | | | | | CAAAGATGGACCATGTGCCCTTCGG (SEQ ID NO: 3862) |
| | | | | | TTTACCCCTTTACTCTGCAAGAATG (SEQ ID NO: 3863) |
| | | | | | AAATTCTGTCTGCCTACTAGTTTTA (SEQ ID NO: 3864) |
| | | | | | CAATAAATGTACCTTATCTCCTTAG (SEQ ID NO: 3865) |
| | | | | | GGCTGAAGGCCATAACTACATAGTG (SEQ ID NO: 3866) |
| 220339_s_at | TPSG1 | PRSS31, TMT, | tryptase gamma 1 | 25823 | GGTGAAAGTCTCCGTGGTGGACACA (SEQ ID NO: 3867) |
| | | trpA | | | GCCTCTGGTCTGCCAGGTGAACGGT (SEQ ID NO: 3868) |
| | | | | | AGGTGAACGGTGCCTGGGTGCAGGC (SEQ ID NO: 3869) |
| | | | | | GGTGCAGGCTGGCATTGTGAGCTGG (SEQ ID NO: 3870) |
| | | | | | CCGCCACATCACAGCATCAGGGGGC (SEQ ID NO: 3871) |
| | | | | | CTCAGAGTCTGGGTACCCCAGGCTC (SEQ ID NO: 3872) |
| | | | | | GCTGCACCCATCTGCGGATGGTACT (SEQ ID NO: 3873) |
| | | | | | CCGCCCCTGACTGATGGCAGGAATC (SEQ ID NO: 3874) |
| | | | | | ATAAGTTACTATTTATTCCGCTCCG (SEQ ID NO: 3875) |
| | | | | | TCCCTCTCCCTTGAGAAGCTGAGTC (SEQ ID NO: 3876) |
| | | | | | GAAGCTGAGTCTTCTGCATCAGATT (SEQ ID NO: 3877) |
| 213593_s_at | TRA2A | HSU53209 | transformer-2 alpha | 29896 | GGTGGGACGAGCCTAATGAAGTGGT (SEQ ID NO: 3878) |
| | | | | | GAAGTGGTTAGTCAACGACCGCACC (SEQ ID NO: 3879) |
| | | | | | GCACCGACCCTTAAGCGTTCTTAAG (SEQ ID NO: 3880) |
| | | | | | AAGCGTTCTTAAGACGAGAGCTGTG (SEQ ID NO: 3881) |
| | | | | | GTGAGGGGAAACTACGCAAGGAGCC (SEQ ID NO: 3882) |
| | | | | | GAATGTGGAAATGCTGTCACGCCTT (SEQ ID NO: 3883) |
| | | | | | TCACGCCTTATTTTTCTAATTCCTC (SEQ ID NO: 3884) |
| | | | | | TCTAATTCCTCGATGTTGGGTTTTT (SEQ ID NO: 3885) |
| | | | | | CTCTTCTTTATATCTCAACTTTTAA (SEQ ID NO: 3886) |
| | | | | | TCTCAACTTTTAATGCTCTTCTTCC (SEQ ID NO: 3887) |
| | | | | | GAACGAATTCATTGGCTCAGTATTT (SEQ ID NO: 3888) |
| 219736_at | TRIM36 | HAPRIN, | tripartite motif- | 55521 | CATTCTATCTAAATTGTGTGTCTGT (SEQ ID NO: 3889) |
| | | RBCC728, | containing 36 | | GTGTGTCTGTTTTTGAAAGGTGTGT (SEQ ID NO: 3890) |
| | | RNF98 | | | AGGTGTGTGCTTTCAAGTAGGTGGT (SEQ ID NO: 3891) |
| | | | | | TATGCATTGTAGCAGTAATCATTTA (SEQ ID NO: 3892) |
| | | | | | GGAATGCTTTTGACATGTTTTAACA (SEQ ID NO: 3893) |
| | | | | | TTAATGGAAATCTGTTACTCAGGCT (SEQ ID NO: 3894) |
| | | | | | TTAGCTTTTTACCCTCAACTCAAGT (SEQ ID NO: 3895) |
| | | | | | AGCAGGCTGTTAATTTCCCATCTAT (SEQ ID NO: 3896) |
| | | | | | ATTTCCCATCTATGAATAGCACTTT (SEQ ID NO: 3897) |
| | | | | | ATGCAGCGTTATGTGGATCATTATG (SEQ ID NO: 3898) |
| | | | | | TTGTGGTTGATACTCAAGCCTTGTA (SEQ ID NO: 3899) |
| 209890_at | TSPAN5 | Tm4sf9, Tspan-5 | tetraspanin 5 | 10098 | CACAGATTCCAATGCAAGTCGAGAG (SEQ ID NO: 3900) |
| | | | | | AGTCGAGAGCGATGTGGCGTTCCAT (SEQ ID NO: 3901) |
| | | | | | CCTGCTGCACTAAAGATCCCGCAGA (SEQ ID NO: 3902) |
| | | | | | CGAAAGGCTGTGTGCCCCAGTTTGA (SEQ ID NO: 3903) |
| | | | | | GCAGGACAATTTAACCATCGTTGCT (SEQ ID NO: 3904) |
| | | | | | CAGATATTTGGGATATGCCTGGCCC (SEQ ID NO: 3905) |
| | | | | | GCCTGGCCCAGAATTTGGTTAGCGA (SEQ ID NO: 3906) |
| | | | | | ATCGAAGCTGTCAGGGCGAGCTGGT (SEQ ID NO: 3907) |
| | | | | | GCTGCTGCAAGACACTGGACAGACC (SEQ ID NO: 3908) |
| | | | | | CTTCGAGCTGCATGGACCTAATCAC (SEQ ID NO: 3909) |
| | | | | | CACAGATGCAGCCTGCAGTCTCGCC (SEQ ID NO: 3910) |
| 213726_x_at | TUBB2C | RP13-122B23.2, | tubulin, beta 2C | 10383 | CCACCTTCATTGGCAACAGCACGGC (SEQ ID NO: 3911) |
| | | TUBB2 | | | ACAGCACGGCCATCCAGGAGCTGTT (SEQ ID NO: 3912) |
| | | | | | CAGGAGCTGTTCAAGCGCATCTCCG (SEQ ID NO: 3913) |
| | | | | | TGCACTGGTACACGGGCGAGGGCAT (SEQ ID NO: 3914) |
| | | | | | ACGAGATGGAGTTCACCGAGGCCGA (SEQ ID NO: 3915) |
| | | | | | GTACCAGCAGTACCAGGATGCCACA (SEQ ID NO: 3916) |
| | | | | | GGGCGAGTTCGAGGAGGAGGCTGAG (SEQ ID NO: 3917) |
| | | | | | GAGGAGGAGGTGGCCTAGAGCCTTC (SEQ ID NO: 3918) |
| | | | | | TGTGAACTCTTTATTCACTCCCAGC (SEQ ID NO: 3919) |
| | | | | | GTCCACATCCATGCTGTACAGACAC (SEQ ID NO: 3920) |
| | | | | | GTACAGACACCACCATTAAAGCATT (SEQ ID NO: 3921) |
| 218382_s_at | U2AF2 | U2AF65 | U2 small nuclear | 11338 | GCAAGTGCCGGGCTTGATGAGCTCC (SEQ ID NO: 3922) |
| | | | RNA auxiliary factor 2 | | AGCTCCCAGGTGCAGATGGGCGGCC (SEQ ID NO: 3923) |
| | | | | | GAGGTCCTGTGCCTCATGAACATGG (SEQ ID NO: 3924) |
| | | | | | GAGGATGTGCGGGACGAGTGCAGCA (SEQ ID NO: 3925) |
| | | | | | GTACGGGCTTGTCAAGTCCATCGAG (SEQ ID NO: 3926) |
| | | | | | AGGTGCCCGGCTGCGGAAAGATCTT (SEQ ID NO: 3927) |
| | | | | | GGAGTTCACCTCTGTGTTTGACTGC (SEQ ID NO: 3928) |
| | | | | | GGCCGCAAGTTCGCCAACAGAGTGG (SEQ ID NO: 3929) |
| | | | | | CACAAAATACTGTGACCCCGACTCT (SEQ ID NO: 3930) |
| | | | | | CCGGGACTTCTGGTAGAGGCGGCTG (SEQ ID NO: 3931) |
| | | | | | GCAGAGGAGTGACAGCCGCAGACAC (SEQ ID NO: 3932) |
| 215057_at | U66046* | | Clone 161455-2-3 B | | ACCAATGTTCAGCCTCTGAGACCAG (SEQ ID NO: 3933) |
| | | | cell expressed mRNA | | AAGCAGTGGCCATGAATGTTCCCTC (SEQ ID NO: 3934) |
| | | | from chromosome X | | GAAGAAGTGTACTCACACTGCCCCA (SEQ ID NO: 3935) |
| | | | | | ACTGCCCCAACACCAGTGAGTGGAA (SEQ ID NO: 3936) |
| | | | | | TATTTATAGGTCTCTCATTTGGTTT (SEQ ID NO: 3937) |
| | | | | | CACAAAATTAACCATTACCCACATT (SEQ ID NO: 3938) |
| | | | | | CATTCCTACCAACAAGAAGTAACCA (SEQ ID NO: 3939) |
| | | | | | TGCAGACAACATATTAGCACATTGC (SEQ ID NO: 3940) |
| | | | | | TCCATGTTCTTCCCATTTATACAGG (SEQ ID NO: 3941) |
| | | | | | CATTTATACAGGAGCAATTCTTGCA (SEQ ID NO: 3942) |
| | | | | | TCCTTGCTCCTCAAATGCCTTAGAG (SEQ ID NO: 3943) |
| 201377_at | UBAP2L | FLJ42300, | ubiquitin associated | 9898 | CCCCCTTACAAGCATTTCTGGACGG (SEQ ID NO: 3944) |
| | | KIAA0144, NICE-4 | protein 2-like | | GCTGAGAGCTAATTTGGCCCAAGGC (SEQ ID NO: 3945) |
| | | | | | ACCAGACCACTGAGGAGAGCCTGCT (SEQ ID NO: 3946) |
| | | | | | CATGGCCTGCGTGGCTTGGGGAAAT (SEQ ID NO: 3947) |
| | | | | | GAGTTGGTGGATACCTTCTGGGCTT (SEQ ID NO: 3948) |
| | | | | | TTCTGGGCTTTTGAACTTGCCCCTC (SEQ ID NO: 3949) |
| | | | | | CTGTCTTACCCATTTCAAGTTCAAG (SEQ ID NO: 3950) |
| | | | | | TTCAAGTTCAAGCGGTGCAGCACCT (SEQ ID NO: 3951) |
| | | | | | GTGCAGCACCTTCGAAGCATCAATG (SEQ ID NO: 3952) |
| | | | | | AAGCATCAATGCACACACCTGCTGT (SEQ ID NO: 3953) |
| | | | | | GCTGTTGCTTTTGATTTCTGGAAGG (SEQ ID NO: 3954) |
| 200683_s_at | UBE2L3 | E2-F1, L-UBC, | ubiquitin-conjugating | 7332 | GAAGCCCTATAATCACAGGTCTGTG (SEQ ID NO: 3955) |
| | | UBCH7, UbcM4 | enzyme E2L 3 | | ATGAATCTCGCCAGAAAGGCTCCTG (SEQ ID NO: 3956) |
| | | | | | TTCTCCCTGCAGCCATTGTAGAAGA (SEQ ID NO: 3957) |
| | | | | | TGTAGAAGATCTGCTGGTCCTTGCA (SEQ ID NO: 3958) |
| | | | | | AAGCTACAGCCAGAATGTCCGTTTG (SEQ ID NO: 3959) |
| | | | | | TGTCCGTTTGAAACTCCTAGCTCAT (SEQ ID NO: 3960) |
| | | | | | CTAGCTCATCTGTCACCGAGCTTCA (SEQ ID NO: 3961) |
| | | | | | CGAGCTTCATCCGAATGTGCCACGG (SEQ ID NO: 3962) |
| | | | | | GCACACTTTGACCCTTTGTAGGATT (SEQ ID NO: 3963) |
| | | | | | TAAAGCACCAGTCTGGGGTCGCCTG (SEQ ID NO: 3964) |
| | | | | | AGCTCACTCAGTAATATCCTTTCAA (SEQ ID NO: 3965) |
| 201649_at | UBE2L6 | MGC40331, RIG- | ubiquitin-conjugating | 9246 | GTGTGTTGTGTATGGACTCACTCCC (SEQ ID NO: 3966) |
| | | B, UBCH8 | enzyme E2L 6 | | CCTTTACATTCCCCAGAGCCAAGGG (SEQ ID NO: 3967) |
| | | | | | GTTTGCAGTTACAGGCCAGTTCTCC (SEQ ID NO: 3968) |
| | | | | | TTCTCCAGCTCTCCATCTTAGAGAG (SEQ ID NO: 3969) |
| | | | | | TGAATCCAGCAGCCAACTCGAATCC (SEQ ID NO: 3970) |
| | | | | | CCCCCTAGGGCTCAGGCACTGAGGG (SEQ ID NO: 3971) |
| | | | | | GGAGGGTACCCTATTTACAACTGAG (SEQ ID NO: 3972) |
| | | | | | GAGTCAGCCAAGCCACTGATGGGAA (SEQ ID NO: 3973) |
| | | | | | GTATATATCCTCCAGCATTCAGTCC (SEQ ID NO: 3974) |
| | | | | | CCAGGGGGAGCCACGGAAACCATGT (SEQ ID NO: 3975) |
| | | | | | GAAACCATGTTCTTGCTTAAGCCAT (SEQ ID NO: 3976) |
| 208997_s_at | UCP2 | SLC25A8, UCPH | uncoupling protein 2 | 7351 | TAAAGGTCCGATTCCAAGCTCAGGC (SEQ ID NO: 3977) |
| | | | (mitochondrial, proton | | ACCAAAGCACCGTCAATGCCTACAA (SEQ ID NO: 3978) |
| | | | carrier) | | CTCTCCCAATGTTGCTCGTAATGCC (SEQ ID NO: 3979) |
| | | | | | TGAGCTGGTGACCTATGACCTCATC (SEQ ID NO: 3980) |
| | | | | | GCCAACCTCATGACAGATGACCTCC (SEQ ID NO: 3981) |
| | | | | | CCTCCCCTGTAGACGTGGTCAAGAC (SEQ ID NO: 3982) |
| | | | | | AGACGAGATACATGAACTCTGCCCT (SEQ ID NO: 3983) |
| | | | | | CTGCCCTGGGCCAGTACAGTAGCGC (SEQ ID NO: 3984) |
| | | | | | TACAAAGGGTTCATGCCCTCCTTTC (SEQ ID NO: 3985) |
| | | | | | AGCTGAAACGAGCCCTCATGGCTGC (SEQ ID NO: 3986) |
| | | | | | GAGAGGCTCCCTTCTGAGCCTCTCC (SEQ ID NO: 3987) |
| 208998_at | UCP2 | SLC25A8, UCPH | uncoupling protein 2 | 7351 | TCTACATTCTCATCTACTCATTGTC (SEQ ID NO: 3988) |
| | | | (mitochondrial, proton | | ACATTCTCATCTACTCATTGTCTCA (SEQ ID NO: 3989) |
| | | | carrier) | | CTCATTGTCTCAGTGCTGGTGGAGT (SEQ ID NO: 3990) |
| | | | | | GTCTCAGTGCTGGTGGAGTTGACAT (SEQ ID NO: 3991) |
| | | | | | AGTGCTGGTGGAGTTGACATTTGAC (SEQ ID NO: 3992) |
| | | | | | CCGTCCCTTGGAAAGTTCAGCCAGA (SEQ ID NO: 3993) |
| | | | | | GAAAGTTCAGCCAGAATCTTCGTCC (SEQ ID NO: 3994) |
| | | | | | AAGTTCAGCCAGAATCTTCGTCCTG (SEQ ID NO: 3995) |
| | | | | | TAGCCCACTTGTCATCCATAAAGCA (SEQ ID NO: 3996) |
| | | | | | AGCCCACTTGTCATCCATAAAGCAA (SEQ ID NO: 3997) |
| | | | | | GTCATCCATAAAGCAAGCTCAACCT (SEQ ID NO: 3998) |
| 212074_at | UNC84A | FLJ12407, | unc-84 homolog A | 23353 | AATGAGATATCTACAAGGCACTTAA (SEQ ID NO: 3999) |
| | | KIAA0810, | (C. elegans) | | GTGTTACAGATGTTTTACCTTAAGA (SEQ ID NO: 4000) |
| | | MGC176649, | | | GACAGTTTTCAGTGTACCGTAAATG (SEQ ID NO: 4001) |
| | | SUN1 | | | GTACCGTAAATGTTGTGTTTTCAGA (SEQ ID NO: 4002) |
| | | | | | GATGGTGCTGACTGGTTTTCTGTAT (SEQ ID NO: 4003) |
| | | | | | ATTGCACAACAGTCCTCAAATACAC (SEQ ID NO: 4004) |
| | | | | | AACTATTCATACATCAAGCAGCATT (SEQ ID NO: 4005) |
| | | | | | TTTTCACTCTCCTTAGAATTGGAAC (SEQ ID NO: 4006) |
| | | | | | AATGCTTTTCAAAATATCTGTCTTT (SEQ ID NO: 4007) |
| | | | | | ATCTGTCTTTGGTAGTGCTTCTGCT (SEQ ID NO: 4008) |
| | | | | | CTGCTGCCACCAAATTGATAAGATG (SEQ ID NO: 4009) |
| 208909_at | UQCRFS1 | RIP1, RIS1, | ubiquinol-cytochrome | 7386 | GAGAGGCAAACCCCTGTTTGTGCGT (SEQ ID NO: 4010) |
| | | RISP, UQCR5 | c reductase, Rieske | | CTGTTTGTGCGTCATAGAACCCAGA (SEQ ID NO: 4011) |
| | | | iron-sulfur | | GGACCCACAGCATGATCTAGATCGA (SEQ ID NO: 4012) |
| | | | polypeptide 1 | | GATAGGTGTTTGCACTCATCTTGGC (SEQ ID NO: 4013) |
| | | | | | TCATCTTGGCTGTGTACCCATTGCA (SEQ ID NO: 4014) |
| | | | | | TTTTGGTGGTTATTACTGCCCTTGC (SEQ ID NO: 4015) |
| | | | | | GGGTCACACTATGATGCATCTGGCA (SEQ ID NO: 4016) |
| | | | | | CAGGATCAGATTGGGTCCTGCTCCT (SEQ ID NO: 4017) |
| | | | | | TGAAGTCCCCACGTATGAGTTCACC (SEQ ID NO: 4018) |
| | | | | | GGACTCAAGTCATAGGCTTCTTTCA (SEQ ID NO: 4019) |
| | | | | | GGCTTCTTTCAGTCTTTATGTCACC (SEQ ID NO: 4020) |
| 202233_s_at | UQCRH | MGC111572, | ubiquinol-cytochrome | 7388 | GCTCGTGTTGAATCTAGAACCGTAG (SEQ ID NO: 4021) |
| | | QCR6 | c reductase hinge | | AGAACCGTAGCCAGACATGGGACTG (SEQ ID NO: 4022) |
| | | | protein | | GACATGGGACTGGAGGACGAGCAAA (SEQ ID NO: 4023) |
| | | | | | GATGCTTACCGAATCCGGAGATCCT (SEQ ID NO: 4024) |
| | | | | | GATCCCCTAACAACAGTGAGAGAGC (SEQ ID NO: 4025) |
| | | | | | GGATTGCACGGAGGAGCTCTTTGAC (SEQ ID NO: 4026) |
| | | | | | AGCTCTTTGACTTCTTGCATGCGAG (SEQ ID NO: 4027) |
| | | | | | TGCATGCGAGGGACCATTGCGTGGC (SEQ ID NO: 4028) |
| | | | | | CATTGCGTGGCCCACAAACTCTTTA (SEQ ID NO: 4029) |
| | | | | | TGGCCCACAAACTCTTTAACAACTT (SEQ ID NO: 4030) |
| | | | | | GTAATTCGCAATGATTCCATCTAAA (SEQ ID NO: 4031) |
| 201568_at | UQCRQ | QCR8, QP-C, | ubiquinol-cytochrome | 27089 | TTGGTTCAGTTTTCCGGAGGGCGAG (SEQ ID NO: 4032) |
| | | | c reductase, complex | | TGGGCCGCGAGTTTGGGAATCTGAC (SEQ ID NO: 4033) |
| | | QPC | III subunit VII, 9.5 kDa | | GAATCTGACGCGGATGCGGCATGTG (SEQ ID NO: 4034) |
| | | | | | GTGATCAGCTACAGCTTGTCACCGT (SEQ ID NO: 4035) |
| | | | | | CTATCCGCACGTCTTCACTAAAGGA (SEQ ID NO: 4036) |
| | | | | | TAAAGGAATCCCCAATGTTCTGCGC (SEQ ID NO: 4037) |
| | | | | | CGCATTCGGGAGTCTTTCTTTCGCG (SEQ ID NO: 4038) |
| | | | | | TGGTGCCGCAGTTTGTAGTGTTTTA (SEQ ID NO: 4039) |
| | | | | | AGAGGAGGATCCAGCTGCCTATGAA (SEQ ID NO: 4040) |
| | | | | | AAATGAGCAACGCATCCGGATGACG (SEQ ID NO: 4041) |
| | | | | | TGTCTCTGAAAGACCTTTCTCTGGA (SEQ ID NO: 4042) |
| 213327_s_at | USP12 | USP12L1 | ubiquitin specific | 219333 | GACAGGAACCAGGAGGCTTGGGAAC (SEQ ID NO: 4043) |
| | | | peptidase 12 | | TATTATGTGGGTCTTGGGGCCTCTA (SEQ ID NO: 4044) |
| | | | | | GGGGCCTCTAACCATCAGTATAGGG (SEQ ID NO: 4045) |
| | | | | | TTTTTCTTTCCTTGATGGCAGTAGA (SEQ ID NO: 4046) |
| | | | | | GCAGTAGAAAGACCTCATTTTCATA (SEQ ID NO: 4047) |
| | | | | | AGACCTCATTTTCATAACATAACTA (SEQ ID NO: 4048) |
| | | | | | ACATAACTACTCTTGATACTTTCTT (SEQ ID NO: 4049) |
| | | | | | GATTCTATCATGAGGTATTTGGCTG (SEQ ID NO: 4050) |
| | | | | | TGAGGTATTTGGCTGGGAGCTGGGA (SEQ ID NO: 4051) |
| | | | | | CTTCAGTCTCCCTGTCTTGTAAAAT (SEQ ID NO: 4052) |
| | | | | | GGTTCTTGAAGAAGGCACTATATAA (SEQ ID NO: 4053) |
| 221654_s_at | USP3 | MGC129878, | ubiquitin specific | 9960 | TCTCACTTTGAGGCACATTTACATC (SEQ ID NO: 4054) |
| | | MGC129879, | peptidase 3 | | TACATCAATGCTTTTGTTCCTCTCA (SEQ ID NO: 4055) |
| | | SIH003, UBP | | | AAGCAAGATGTGTTCCTTATTGTGA (SEQ ID NO: 4056) |
| | | | | | GTGAAGAGCGACACAACTGCCTGCT (SEQ ID NO: 4057) |
| | | | | | GCTGCCTTTCCACAGCTATAATGGA (SEQ ID NO: 4058) |
| | | | | | TGGACATCAGGTTGACTCTAAATCA (SEQ ID NO: 4059) |
| | | | | | GTGTGCACAATACTTGTGGCCCACA (SEQ ID NO: 4060) |
| | | | | | GACCAGGTAATTACTGCTTGTCTCT (SEQ ID NO: 4061) |
| | | | | | TTACTGCTTGTCTCTCAAGGCTGCT (SEQ ID NO: 4062) |
| | | | | | TCAAGGCTGCTGTCTTTATCAGCAC (SEQ ID NO: 4063) |
| | | | | | GGTTCAGTTGTACTTGTCCTGCAAA (SEQ ID NO: 4064) |
| 205139_s_at | UST | 2OST | uronyl-2- | 10090 | AAACATTCATCCTCTTACTGCAAGT (SEQ ID NO: 4065) |
| | | | sulfotransferase | | TATCTGGGTACTTTTACCTGTGTGT (SEQ ID NO: 4066) |
| | | | | | AAGGCATTTCTTTTCAGCAGTGATC (SEQ ID NO: 4067) |
| | | | | | TGACGGATTTACTTACAGGGCCTTA (SEQ ID NO: 4068) |
| | | | | | GCCTTAATGTTATTTTGTCCCAGCC (SEQ ID NO: 4069) |
| | | | | | CACCCTCTAGGTCCTAAAAGTCAAG (SEQ ID NO: 4070) |
| | | | | | CCTGGGCCCAACAGTTTGTACTTCA (SEQ ID NO: 4071) |
| | | | | | ATTATAACCTTTCAGCACATTCCAA (SEQ ID NO: 4072) |
| | | | | | CATTCCAAGGTTTTAGTTACTCAGG (SEQ ID NO: 4073) |
| | | | | | ATTATTATGAACCTTCAGCCTACTT (SEQ ID NO: 4074) |
| | | | | | AGCCTACTTTCTTGAGTGCCGTAAA (SEQ ID NO: 4075) |
| 208626_s_at | VAT1 | FLJ20230, VATI | vesicle amine | 10493 | CAAAAACAGGTGCCCTCATCGTGGT (SEQ ID NO: 4076) |
| | | | transport protein 1 | | GTCCCGTCTCTATGGTGGTTGAGGA (SEQ ID NO: 4077) |
| | | | homolog (T. californica) | | AAAAATCCAAGCACATTCCCCTTGC (SEQ ID NO: 4078) |
| | | | | | GCCCTACTGCCTTCTCAAAGCAGAG (SEQ ID NO: 4079) |
| | | | | | GGATGGTCAGGACCTGGGCCATTGC (SEQ ID NO: 4080) |
| | | | | | GGTAGGGAGGTCACTCCCTCTACTC (SEQ ID NO: 4081) |
| | | | | | CTCCCTCTACTCACTGAGCTAGGAT (SEQ ID NO: 4082) |
| | | | | | TAGGGAGGGTTATTGCCCCAACCAT (SEQ ID NO: 4083) |
| | | | | | GAGGTGGAGGGACAGGCTCAGCCTC (SEQ ID NO: 4084) |
| | | | | | GTGAAGTGCGATTTCTGCTTTTGTG (SEQ ID NO: 4085) |
| | | | | | CCATTACCACAGCTGCCTTTGTGTG (SEQ ID NO: 4086) |
| 210849_s_at | VPS41 | HVPS41, | vacuolar protein | 27072 | ATTTCTTCATCTATTCCTGTACTAA (SEQ ID NO: 4087) |
| | | HVSP41, | sorting 41 homolog | | AGAATTTGGGGCTCTCTTCATGCCT (SEQ ID NO: 4088) |
| | | hVps41p | (S. cerevisiae) | | CAACTGAGAATTCTCCCAGCTGCCT (SEQ ID NO: 4089) |
| | | | | | GCCTGAAAGCGTCGCCAACTGTGGT (SEQ ID NO: 4090) |
| | | | | | GCAAGCTGCTACCTGCAACTTGGAC (SEQ ID NO: 4091) |
| | | | | | AACTTGGACGTTGTTTCCACGTGCT (SEQ ID NO: 4092) |
| | | | | | CTGGCTACGATTCTTGCATTCTGGG (SEQ ID NO: 4093) |
| | | | | | GGCTTTTTTCTGTGTCATCAACTAT (SEQ ID NO: 4094) |
| | | | | | AGCAGGCTGATGTCCTGCACCATTA (SEQ ID NO: 4095) |
| | | | | | TTCTGTGTGCTGTGACGACTGTCAA (SEQ ID NO: 4096) |
| | | | | | AGTATCTGGCCATGGCGGACACTCA (SEQ ID NO: 4097) |
| 205126_at | VRK2 | | vaccinia related | 7444 | GCGCTGAGTCCTGTGCAACATGGAA (SEQ ID NO: 4098) |
| | | | kinase 2 | | AGCTATACACAATTCCCAAACTCAT (SEQ ID NO: 4099) |
| | | | | | GATTTTACCAGTCCAGATATATTCA (SEQ ID NO: 4100) |
| | | | | | ACACTTCCACAGTCAGCACGGGGAT (SEQ ID NO: 4101) |
| | | | | | TCAGCACGGGGATCACAGACTTAGA (SEQ ID NO: 4102) |
| | | | | | TGGACTTTGGCCTACAATTTCCCAG (SEQ ID NO: 4103) |
| | | | | | ATTTCCCAGTTTACTCTTAGTGAAG (SEQ ID NO: 4104) |
| | | | | | TATTATCGCATCATCATACCTGTCC (SEQ ID NO: 4105) |
| | | | | | CATACCTGTCCTTTTGATGTTAGTA (SEQ ID NO: 4106) |
| | | | | | TTCCAGCTCTTCACCGAAATGTTGT (SEQ ID NO: 4107) |
| | | | | | CTTATTTCAGTGTTTCCTTCCAGAC (SEQ ID NO: 4108) |
| 200628_s_at | WARS | GAMMA-2, IFI53, | tryptophanyl-tRNA | 7453 | GGACGTGTCTTTCATGTACCTGACC (SEQ ID NO: 4109) |
| | | IFP53 | synthetase | | GGACGACGACAAGCTCGAGCAGATC (SEQ ID NO: 4110) |
| | | | | | GAAGGATTACACCAGCGGAGCCATG (SEQ ID NO: 4111) |
| | | | | | GAGCCATGCTCACCGGTGAGCTCAA (SEQ ID NO: 4112) |
| | | | | | CATAGAGGTTCTGCAGCCCTTGATC (SEQ ID NO: 4113) |
| | | | | | GTCCTTCGACTTTCAGTAGCACTCG (SEQ ID NO: 4114) |
| | | | | | TCAATAATCCCAGCCCAGTCAAAGC (SEQ ID NO: 4115) |
| | | | | | ACCTGTAGGCTTCTGTCTCATGGTA (SEQ ID NO: 4116) |
| | | | | | GTTTCTTCCTGTGAGTTCCATTATT (SEQ ID NO: 4117) |
| | | | | | CAAAGCAGCCCCACAGTGGAGCCTT (SEQ ID NO: 4118) |
| | | | | | GTGGAGCCTTCGGCTGGAAGTCCAT (SEQ ID NO: 4119) |
| 200609_s_at | WDR1 | AIP1, NORI-1 | WD repeat domain 1 | 9948 | GGCTCTCACTATCTGTCAGGGGAGG (SEQ ID NO: 4120) |
| | | | | | GCAAAGCCGGAATTCTGTGTTGAAC (SEQ ID NO: 4121) |
| | | | | | TGAACAGATGTCTGTCTCCCTAGTG (SEQ ID NO: 4122) |
| | | | | | AGTGTGTGACTCACACCTTGTGGCT (SEQ ID NO: 4123) |
| | | | | | CGCCACCTCCAGATCAGATGGGGAC (SEQ ID NO: 4124) |
| | | | | | GACACACAACCCCTGGATATGTTTC (SEQ ID NO: 4125) |
| | | | | | GTTGCCTGTCAGTGTTTACAAACTA (SEQ ID NO: 4126) |
| | | | | | TGACGGCACCGTGTCCAAGTTTTTA (SEQ ID NO: 4127) |
| | | | | | TTTAGAACCCTTGTTAGCCAGACCG (SEQ ID NO: 4128) |
| | | | | | TAGCCAGACCGAGGTGTCCTGGTCA (SEQ ID NO: 4129) |
| | | | | | ACCATCATGCTTTGATGTTCCCCTG (SEQ ID NO: 4130) |
| 209592_s_at | WDR68 | AN11; HAN11 | WD repeat domain | 10238 | GATGGCTCGGTGCGGATGTTTGACC (SEQ ID NO: 4131) |
| | | | 68 | | ACAGCACCATCATTTACGAAGACCC (SEQ ID NO: 4132) |
| | | | | | CATTTACGAAGACCCACAGCATCAC (SEQ ID NO: 4133) |
| | | | | | TGCTTCGCCTCTGCTGGAACAAGCA (SEQ ID NO: 4134) |
| | | | | | GAGATCAACAATGTGCAGTGGGCAT (SEQ ID NO: 4135) |
| | | | | | CAGTGGGCATCAACTCAGCCCGACT (SEQ ID NO: 4136) |
| | | | | | CCATCTGCTACAACAACTGCCTGGA (SEQ ID NO: 4137) |
| | | | | | CTGCCTGGAGATACTCAGAGTGTAG (SEQ ID NO: 4138) |
| | | | | | AGAGTGTAGTGTTGGTGGCGCTGTG (SEQ ID NO: 4139) |
| | | | | | TGTGCCCACGAGGCAGGGGCTTTTG (SEQ ID NO: 4140) |
| | | | | | GCAGGGGCTTTTGTATTTCCTGCCT (SEQ ID NO: 4141) |
| 208459_s_at | XPO7 | KIAA0745, | exportin 7 | 23039 | TTATTGCAAGCCTGGAACCTCACGT (SEQ ID NO: 4142) |
| | | RANBP16 | | | GAACCTCACGTCATCATGTATATTC (SEQ ID NO: 4143) |
| | | | | | ACTTACTGCACTTGACACCATGGTA (SEQ ID NO: 4144) |
| | | | | | CCATGGTATGCACAGGCTGCTGCTC (SEQ ID NO: 4145) |
| | | | | | GACCACATTGTGACATACCTCTTCA (SEQ ID NO: 4146) |
| | | | | | TTCAAGCAGCTGTCACGTAGCACCA (SEQ ID NO: 4147) |
| | | | | | ACCACACCCCTGAACCAGGAGAGCG (SEQ ID NO: 4148) |
| | | | | | GCTGTCCACGGTGCTGAACATCATC (SEQ ID NO: 4149) |
| | | | | | TCCCGACCACTACTTGGCTTGATAT (SEQ ID NO: 4150) |
| | | | | | GCCAGCCACCGGAGAAGCAGCAGGC (SEQ ID NO: 4151) |
| | | | | | CCTGTCAGCATTCCGTCGAGAAGTC (SEQ ID NO: 4152) |
| 212166_at | XPO7 | KIAA0745, | exportin 7 | 23039 | ATTCCTGTTACTGTATTAACCCTTG (SEQ ID NO: 4153) |
| | | RANBP16 | | | GGAACTCTAAGCCATGCCAGAACAC (SEQ ID NO: 4154) |
| | | | | | CCCTAGCCCCTTGCAGTGATAAATA (SEQ ID NO: 4155) |
| | | | | | GTGTTTGGTGTTCTTATCTCCACCC (SEQ ID NO: 4156) |
| | | | | | TCAGACAGATGCCTCTTGCTTTTAA (SEQ ID NO: 4157) |
| | | | | | ACGTGTTGTAGGGTTCTTGGTCTGT (SEQ ID NO: 4158) |
| | | | | | GAGAAGGAAGTGAGCCCACTGCTCT (SEQ ID NO: 4159) |
| | | | | | ATGTGGGTGAGTCCACCAGAGGCCC (SEQ ID NO: 4160) |
| | | | | | CCAGCCCTCGAGGCAGTGTGTGTGG (SEQ ID NO: 4161) |
| | | | | | ATATGTACCCTGCACTCATGAATGT (SEQ ID NO: 4162) |
| | | | | | GAAGTATTTAACATTCTCCCATCCC (SEQ ID NO: 4163) |
| 208627_s_at | YBX1 | YB1; BP-8; | Y box binding protein 1 | 4904 | TAACCCCAGGAAGTACCTTCGCAGT (SEQ ID NO: 4164) |
| | | CSDB; DBPB; | | | GCGGAGGCAGCAAATGTTACAGGTC (SEQ ID NO: 4165) |
| | | YB-1; CSDA2; | | | GGTGGTGTTCCAGTTCAAGGCAGTA (SEQ ID NO: 4166) |
| | | NSEP1; NSEP-1; | | | GCAGACCGTAACCATTATAGACGCT (SEQ ID NO: 4167) |
| | | MDR-NF1; | | | GACGCTATCCACGTCGTAGGGGTCC (SEQ ID NO: 4168) |
| | | MGC104858; | | | GAGGGATCGGAGAGTGCTCCCGAAG (SEQ ID NO: 4169) |
| | | MGC110976; | | | GTTCCCACCTTACTACATGCGGAGA (SEQ ID NO: 4170) |
| | | MGC117250 | | | CTATGGGCGTCGACCACAGTATTCC (SEQ ID NO: 4171) |
| | | | | | TTCCAACCCTCCTGTGCAGGGAGAA (SEQ ID NO: 4172) |
| | | | | | GGGTGCTGACAACCAGGGTGCAGGA (SEQ ID NO: 4173) |
| | | | | | GGGATATAGACCACGATTCCGCAGG (SEQ ID NO: 4174) |
| 208628_s_at | YBX1 | YB1; BP-8; | Y box binding protein 1 | 4904 | AACTTCAATTACCGACGCAGACGCC (SEQ ID NO: 4175) |
| | | CSDB; DBPB; | | | GAAAACCCTAAACCACAAGATGGCA (SEQ ID NO: 4176) |
| | | YB-1; CSDA2; | | | AGAGACAAAAGCAGCCGATCCACCA (SEQ ID NO: 4177) |
| | | NSEP1; NSEP-1; | | | ATCCACCAGCTGAGAATTCGTCCGC (SEQ ID NO: 4178) |
| | | MDR-NF1; | | | TGAGTAAATGCCGGCTTACCATCTC (SEQ ID NO: 4179) |
| | | MGC104858; | | | ATCTCTACCATCATCCGGTTTAGTC (SEQ ID NO: 4180) |
| | | MGC110976; | | | TCATCCGGTTTAGTCATCCAACAAG (SEQ ID NO: 4181) |
| | | MGC117250 | | | GATTGGAGCTGAAGACCTAAAGTGC (SEQ ID NO: 4182) |
| | | | | | CCTAAAGTGCTTGCTTTTTGCCCGT (SEQ ID NO: 4183) |
| | | | | | CTTTTTGCCCGTTGACCAGATAAAT (SEQ ID NO: 4184) |
| | | | | | GCATTATCTATGCAGCATGGGGTTT (SEQ ID NO: 4185) |
| 200640_at | YWHAZ | KCIP-1, | tyrosine 3- | 7534 | ATACTCTTATAGCCTGCCTTCAATT (SEQ ID NO: 4186) |
| | | MGC111427, | monooxygenase/tryptophan | | TATTCTTTCTATTTGTCAGGTGCAC (SEQ ID NO: 4187) |
| | | MGC126532, | 5- | | GTCAGGTGCACAAGATTACCTTCCT (SEQ ID NO: 4188) |
| | | MGC138156 | monooxygenase | | CAAGATTACCTTCCTGTTTTAGCCT (SEQ ID NO: 4189) |
| | | | activation protein, | | CTTGTCACCAACCATTCTTACTTGG (SEQ ID NO: 4190) |
| | | | zeta polypeptide | | AACCATTCTTACTTGGTGGCCATGT (SEQ ID NO: 4191) |
| | | | | | AAAAAGGCCGCATGATCTTTCTGGC (SEQ ID NO: 4192) |
| | | | | | CTGGCTCCACTCAGTGTCTAAGGCA (SEQ ID NO: 4193) |
| | | | | | CCTCATCCTATTTACTGCAGCAAAT (SEQ ID NO: 4194) |
| | | | | | GCAAATCTCTCCTTAGTTGATGAGA (SEQ ID NO: 4195) |
| | | | | | GATGAGACTGTGTTTATCTCCCTTT (SEQ ID NO: 4196) |
| 205383_s_at | ZBTB20 | RP23-283M18.1, | zinc finger and BTB | 26137 | GGAGAGAAGTCCTACGAGTGCTACA (SEQ ID NO: 4197) |
| | | 1300017A20Rik, | domain containing 20 | | AAAGAAGTTCTCTCACAAGACCCTC (SEQ ID NO: 4198) |
| | | 7330412A13Rik, | | | CTCCGTCTGCCCAGCAAAGTTTGAC (SEQ ID NO: 4199) |
| | | A930017C21Rik, | | | CGAGCAGTTCAACGACCACATGAGG (SEQ ID NO: 4200) |
| | | D16Wsu73e, | | | TGAAGAACTGTTTTTTGCCTGCTGG (SEQ ID NO: 4201) |
| | | DPZF, HOF, | | | GGTACATTACATTTCCGGAGGCTTG (SEQ ID NO: 4202) |
| | | ODA-8S, Oda8, | | | GAATAATAGTTTTCCCAGTCTCCCT (SEQ ID NO: 4203) |
| | | Zfp288 | | | CCCTCGGATGGTGGCCTTAAGGCCT (SEQ ID NO: 4204) |
| | | | | | GCCTTAAGGCCTGGTAGTGCTTCAA (SEQ ID NO: 4205) |
| | | | | | GAGGTCCACTGGTTGGATCTCTAGC (SEQ ID NO: 4206) |
| | | | | | ATCTCTAGCTACTGGCCTCTAAATA (SEQ ID NO: 4207) |
| 206169_x_at | ZC3H7B | DKFZp434K0920, | zinc finger CCCH- | 23264 | CATGGTGGCATGCTTCTGTAATCCC (SEQ ID NO: 4208) |
| | | FLJ13787, | type containing 7B | | ATGGTGGCATGCTTCTGTAATCCCA (SEQ ID NO: 4209) |
| | | KIAA1031, | | | GCTACTCAGGAGGCCGAGATTAGAG (SEQ ID NO: 4210) |
| | | RoXaN | | | GAGGCCGAGATTAGAGAATCACTTG (SEQ ID NO: 4211) |
| | | | | | GAATCACTTGAATGTGGGAGTCGGA (SEQ ID NO: 4212) |
| | | | | | CTTGAATGTGGGAGTCGGAGGTTGT (SEQ ID NO: 4213) |
| | | | | | GAATGTGGGAGTCGGAGGTTGTAAT (SEQ ID NO: 4214) |
| | | | | | GTGGGAGTCGGAGGTTGTAATGAGC (SEQ ID NO: 4215) |
| | | | | | GGAGTCGGAGGTTGTAATGAGCTGA (SEQ ID NO: 4216) |
| | | | | | GTCGGAGGTTGTAATGAGCTGAGAT (SEQ ID NO: 4217) |
| | | | | | GAGGTTGTAATGAGCTGAGATCACA (SEQ ID NO: 4218) |
| 202778_s_at | ZMYM2 | FIM, MYM, | zinc finger, MYM-type 2 | 7750 | GAGTGAAAGTTGCCATTATTCTATG (SEQ ID NO: 4219) |
| | | RAMP, SCLL, | | | GAGAATGTGCCATGTATAATTTTTT (SEQ ID NO: 4220) |
| | | ZNF198 | | | ACATCCATATTGCACAACTCTACTG (SEQ ID NO: 4221) |
| | | | | | AACTCTACTGTTGCAAAGCTTCCTT (SEQ ID NO: 4222) |
| | | | | | TCCTTGGAAGGGGGCTCTTTTACTG (SEQ ID NO: 4223) |
| | | | | | TACTGGGTTCTTAACCAGATGGTTG (SEQ ID NO: 4224) |
| | | | | | GGTTGTGTATGGGTAGCACTACTAA (SEQ ID NO: 4225) |
| | | | | | GAACTTGCAGTGTCTTTCGGAATTT (SEQ ID NO: 4226) |
| | | | | | ATTTTAGTTACTGAAGCCTTACAAG (SEQ ID NO: 4227) |
| | | | | | GAGAGATACCATCTTCTGTACCAAA (SEQ ID NO: 4228) |
| | | | | | GTAATGTGAATCTATGCTGGTGAAA (SEQ ID NO: 4229) |
| 215948_x_at | ZMYM5 | MYM; ZNF237; | zinc finger, MYM-type 5 | 9205 | ATACCAACTTGGGAGATGTCGCTAA (SEQ ID NO: 4230) |
| | | HSPC050; | | | GATGTCGCTAAAGGACTTCAGTCAA (SEQ ID NO: 4231) |
| | | ZNF198L1 | | | AATATACAAACGTACACCCCATCTT (SEQ ID NO: 4232) |
| | | | | | CCATCTTTAACTCCACAGACCAAGA (SEQ ID NO: 4233) |
| | | | | | GAATGTGGCAGGAGACTTATTTCAG (SEQ ID NO: 4234) |
| | | | | | GAATTTGCAACTCATCATAGTCCTG (SEQ ID NO: 4235) |
| | | | | | AAGGCTAATGTCATTCTTCCAGTAG (SEQ ID NO: 4236) |
| | | | | | GAATCAAGCAAATCCTTCCAAGAAT (SEQ ID NO: 4237) |
| | | | | | ATCTTGTTTGTCTCCCTGTGAAAAC (SEQ ID NO: 4238) |
| | | | | | ACTCTTTCATCTACATAATGCACGT (SEQ ID NO: 4239) |
| | | | | | TAATGCACGTGTTCTGGATGTATAA (SEQ ID NO: 4240) |
| 207605_x_at | ZNF117 | H-plk, HPF9, | zinc finger protein | 51351 | GCGGCAAAGCTTTTAACCGATCCTC (SEQ ID NO: 4241) |
| | | MGC22613 | 117 | | ACCGATCCTCAAAACTTACTGAACA (SEQ ID NO: 4242) |
| | | | | | GTGACAAGGCCTTTAACCTGTCCTC (SEQ ID NO: 4243) |
| | | | | | CCTGTCCTCAACGCTTACTAAACAT (SEQ ID NO: 4244) |
| | | | | | TAAACAGTTCTCACACCTTGCTATA (SEQ ID NO: 4245) |
| | | | | | TCTCACACCTTGCTATACATAATAT (SEQ ID NO: 4246) |
| | | | | | GGCAAAGCTTTTAACTCATCCTCAA (SEQ ID NO: 4247) |
| | | | | | TCATCCTCAAACCTTACTGCACATA (SEQ ID NO: 4248) |
| | | | | | GCAAAGCTAACCTATCATCAACCCT (SEQ ID NO: 4249) |
| | | | | | CAACCCTTACTCCACATAAGACAAT (SEQ ID NO: 4250) |
| | | | | | AATGCTTGTAACTAAATCTCAAACT (SEQ ID NO: 4251) |
| 219123_at | ZNF232 | ZSCAN11 | zinc finger protein | 7775 | TGGTCCCCTGCCCAGGAGGAAAGTT (SEQ ID NO: 4252) |
| | | | 232 | | TATAACTCACATCTTGTTGTCCACC (SEQ ID NO: 4253) |
| | | | | | CACATCTTGTTGTCCACCAGAGAGT (SEQ ID NO: 4254) |
| | | | | | AAACAGAGCTCAAACCTCGGTCAGC (SEQ ID NO: 4255) |
| | | | | | AAGGCCTTCAGATGGGGTGCTCATC (SEQ ID NO: 4256) |
| | | | | | ATGGGGTGCTCATCTTGTTCAGCAT (SEQ ID NO: 4257) |
| | | | | | AGCTCATATCTAAGTCAGCATCGGA (SEQ ID NO: 4258) |
| | | | | | GGTGCTCAGAGCTCATTAGACATCG (SEQ ID NO: 4259) |
| | | | | | ACATCGGAGAGTTCATGCCAGAAAA (SEQ ID NO: 4260) |
| | | | | | TGCCAGAAAAGAGCCTTCCCATTGA (SEQ ID NO: 4261) |
| | | | | | GAATTCTACATCGGTCTAATCTACT (SEQ ID NO: 4262) |
| 206829_x_at | ZNF430 | DKFZp762K012, | zinc finger protein | 80264 | GATAAAGCCTTTAGCCAGTCTTCAA (SEQ ID NO: 4263) |
| | | FLJ13659, | 430 | | AGCCAGTCTTCAACTCTTACTAAAC (SEQ ID NO: 4264) |
| | | MGC133232 | | | GGAGAGAAACCCTACAACTGTGAAG (SEQ ID NO: 4265) |
| | | | | | ATACGGCAAAGCTTTCAACCAGTCC (SEQ ID NO: 4266) |
| | | | | | TTCAACCAGTCCTCAAACCTTATTG (SEQ ID NO: 4267) |
| | | | | | ATTGTGGCAAAGCCTCTAACCCGTC (SEQ ID NO: 4268) |
| | | | | | CCCGTCCTGAATTCTTACTAAACAT (SEQ ID NO: 4269) |
| | | | | | ATGGCAAAGCCTTCAACAAGTCCTC (SEQ ID NO: 4270) |
| | | | | | ACAAGTCCTCAATTCTTACCAGACA (SEQ ID NO: 4271) |
| | | | | | AGATAATTCTGGCTGGGTGCGGTGG (SEQ ID NO: 4272) |
| | | | | | GGCTGAGACGGGTGAATTACATGAG (SEQ ID NO: 4273) |

All gene probe set identification numbers and Entrez Gene identification numbers of Table 1 are hereby incorporated by reference in their entirety

[0050] The term “prognosis” as used in the context of the present invention refers to the prediction of disease outcome for a subject having colon cancer. Disease outcome encompasses disease progression, reoccurrence, metastasis, and drug resistance. Determining the prognosis of a subject having colon cancer in accordance with the methods of the present invention has particular value for determining an appropriate treatment plan. For example, the prognosis of a subject determined using the methods of the present invention can predict a subject's response to a specific drug or combination of drugs, chemotherapy, radiation therapy, or surgical removal, and whether survival after following the administration of a particular treatment plan is likely.

[0051] As used herein a “disease prognosis expression profile” refers to gene expression of a collection of genes informative of disease outcome that is associated with a good disease outcome or a bad disease outcome. The gene expression of a collection of genes that is associated with a good disease outcome is a good disease prognosis expression profile. A good disease prognosis expression profile consists of genes having expression levels that are below the average tumor sample expression level and/or genes having expression levels that are above the average tumor sample expression level. In a preferred embodiment of the present invention a good disease prognosis expression profile for the group of 176 genes informative of colon cancer prognosis consists of genes having expression levels that are below that of an average tumor sample expression level that are selected from the group consisting of AK023058*, AIP, ARL2BP, C1GALT1, CDC42BPA, C8orf70, CLN5, COBL, CYB5B, MOSPD1, DOCK9, EGFR, FKBP14, DND1, GREM2, GPR177, GALNS, GRB10, GRP, GSTA1, RP3-377H14.5, HOXB7, ZNF117, TNIK, LANCL1, METRN, LEPREL1, NAB1, NISCH, OGT, OSBPL3, PDGFA, PRDM2, PRELP, PSPC1, RECQL, RYK, SMURF2, TLN1, UNC84A, USP12, ZMYM2, ZMYM5, AL359599*, ARL4A, N4BP2L2, GLS, C19orf36, TMCC1, METTL3, TMEM16A, RTN2, SCAMP1, SF3B1, SOX4, STK3, ZNF430, C6orf15, C7orf10, CHST12, ETV1, ACSL4, FLJ10357, C5orf23, AA058828*, CDR2L, KLC1, MAP4, NUMB, PAM, PGDS, PTHLH, ZC3H7B, SAV1, SGCD, SYNGR1, TES, IFT88, TRIM36 and VPS41. The good disease prognosis expression profile for the group of 176 genes further consists of genes having expression levels that are above the average tumor sample expression level that are selected from the group consisting of SERPINA1, RPLP0, RPLP0-like, CYB561, AKR1A1, AP3D1, ARL6IP4, OGFOD2, ASNA1, CFB, ERP29, SMG7, CASP1, CCNA2, LOC100131861, SAMM50, COX5A, CXCL11, DAZAP2, DDX23, FDFT1, COMMD4, GCHFR, GRHPR, GSR, ISG20, ITGAE, KIAA0746, SERINC2, FRYL, LRRC47, LAMP3, R3HCC1, MAPKAPK5, MCM5, MCRS1, TMEM106C, MMP3, MTUS1, LRRC41, NAT1, NDUFC1, YBX1, PEBP1, PIGR, PSMA5, SFPQ, SLC25A3, SLC39A8, SQRDL, SRP72, SSNA1, TAPBPL, TEGT, PBK, UCP2, UQCRH, XPO7, CCT2, CNOT7, DHX15, TMEM87A, ELP3, FAM82C, LL22NC03-5H6.5, DENND2D, WDR68, IL15RA, DENND2A, KIF13B, MFHAS1, SPATA5L1, MYRIP, PIGT, PSMD9, RPS27L, TEGT, TNFRSF10B, UBE2L6, USP3, ATP5B, CALML4, C1orf144, TMEM33, C12orf52, GHITM, H2AFZ, LAP3, MRPL46, SORD, CNPY2, TNFSF10, U2AF2, CMPK1, UQCRFS1, WARS and WDR1.

[0052] The gene expression of a collection of genes informative of disease outcome that is associated with a bad disease outcome is a bad disease prognosis expression profile. A bad disease prognosis expression profile consists of genes having expression levels above and/or below the average tumor sample expression level. In a preferred embodiment of the present invention, a bad disease prognosis expression file for the collection of 176 genes informative of colon cancer prognosis consists of genes having expression levels that are below that of an average tumor sample expression level selected from the group consisting of SERPINA1, RPLP0, RPLP0-like, CYB561, AKR1A1, AP3D1, ARL6IP4, OGFOD2, ASNA1, CFB, ERP29, SMG7, CASP1, CCNA2, LOC100131861, SAMM50, COX5A, CXCL11, DAZAP2, DDX23, FDFT1, COMMD4, GCHFR, GRHPR, GSR, ISG20, ITGAE, KIAA0746, SERINC2, FRYL, LRRC47, LAMP3, R3HCC1, MAPKAPK5, MCM5, MCRS1, TMEM106C, MMP3, MTUS1, LRRC41, NAT1, NDUFC1, YBX1, PEBP1, PIGR, PSMA5, SERPINA1, SFPQ, SLC25A3, SLC39A8, SQRDL, SRP72, SSNA1, TAPBPL, TEGT, PBK, UCP2, UQCRH, XPO7, CCT2, CNOT7, DHX15, TMEM87A, ELP3, FAM82C, LL22NC03-5H6.5, DENND2D, WDR68, IL15RA, DENND2A, KIF13B, MFHAS1, SPATA5L1, MYRIP, PIGT, PSMD9, RPS27L, TNFRSF10B, UBE2L6, USP3, ATP5B, CALML4, C1orf144, TMEM33, C12orf52, GHITM, H2AFZ, LAP3, MRPL46, SORD, CNPY2, TNFSF10, U2AF2, CMPK1, UQCRFS1, WARS and WDR; and genes having expression levels that are above the average tumor sample expression level selected from the group consisting of AK023058*, AIP, ARL2BP, C1GALT1, CDC42BPA, C8orf70, CLN5, COBL, CYB5B, MOSPD1, DOCK9, EGFR, FKBP14, DND1, GREM2, GPR177, GALNS, GRB10, GRP, GSTA1, RP3-377H14.5, HOXB7, ZNF117, TNIK, LANCL1, METRN, LEPREL1, NAB1, NISCH, OGT, OSBPL3, PDGFA, PRDM2, PRELP, PSPC1, RECQL, RYK, SMURF2, TLN1, UNC84A, USP12, ZMYM2, ZMYM5, AL359599*, ARL4A, N4BP2L2, GLS, C19orf36, TMCC1, METTL3, TMEM16A, RTN2, SCAMP1, SF3B1, SOX4, STK3, ZNF430, C6orf15, C7orf10, CHST12, ETV1, ACSL4, FLJ10357, C5orf23, AA058828*, CDR2L, KLC1, MAP4, NUMB, PAM, PGDS, PTHLH, ZC3H7B, SAV1, SGCD, SYNGR1, TES, IFT88, TRIM36 and VPS41.

[0053] Another aspect of the present invention relates to a method for determining the prognosis of a subject having colon cancer that involves obtaining a biological sample from the subject and detecting the expression levels of at least five genes selected from the group of 101 genes informative of colon cancer prognosis. The group of 101 genes informative of colon cancer prognosis are provided in Table 2 below. This method further involves comparing the detected expression levels of the at least five genes from the biological sample with the expression levels of the corresponding at least five genes when associated with a good disease prognosis expression profile and when associated with a bad disease prognosis expression profile. Based on that comparison, the prognosis of the subject having colon cancer is determined.

TABLE 2
101 Genes Informative of Colon Cancer Prognosis

| | | | | Accession | | |
|---|---|---|---|---|---|---|
| | | | | # | | |
| Probe Set | Gene | | | (Entrez | | |
| ID | Symbol | AKA | Gene Title | Gene ID) | Probe Sequence(s) | |
| 200027_at | NARS | ASNRS, | asparaginyl- | 4677 | ATCTTTTCTAACTCTGCTTAGCTGC | (SEQ ID NO: 4274) |
| | | NARS1 | tRNA | | AGCTGCTAATAATCCTGAGGCATAG | (SEQ ID NO: 4275) |
| | | | synthetase | | TAGTGATTCACAGTATCCCTCTTAG | (SEQ ID NO: 4276) |
| | | | | | AGTATCCCTCTTAGCATTAATTTAA | (SEQ ID NO: 4277) |
| | | | | | GAGGCAGATTGATTTTCCCTCTTTC | (SEQ ID NO: 4278) |
| | | | | | CCCACCATGTCCTTAGATCTAATCT | (SEQ ID NO: 4279) |
| | | | | | TAGATCTAATCTGTGCTACCTTATT | (SEQ ID NO: 4280) |
| | | | | | GCTACCTTATTAACTCACAGCAGGC | (SEQ ID NO: 4281) |
| | | | | | ACAGCAGGCTTACTGAATGGCTTCA | (SEQ ID NO: 4282) |
| | | | | | CAGATTTAGTTGATTTCTCCACCAA | (SEQ ID NO: 4283) |
| | | | | | GCATGTCATGTATTCTCAATAGGCT | (SEQ ID NO: 4284) |
| 200609_s_{—} | WDR1 | API, NORI-1 | WD repeat | 9948 | GGCTCTCACTATCTGTCAGGGGAGG | (SEQ ID NO: 4285) |
| at | | | domain 1 | | GCAAAGCCGGAATTCTGTGTTGAAC | (SEQ ID NO: 4286) |
| | | | | | TGAACAGATGTCTGTCTCCCTAGTG | (SEQ ID NO: 4287) |
| | | | | | AGTGTGTGACTCACACCTTGTGGCT | (SEQ ID NO: 4288) |
| | | | | | CGCCACCTCCAGATCAGATGGGGAC | (SEQ ID NO: 4289) |
| | | | | | GACACACAACCCCTGGATATGTTTC | (SEQ ID NO: 4290) |
| | | | | | GTTGCCTGTCAGTGTTTACAAACTA | (SEQ ID NO: 4291) |
| | | | | | TGACGGCACCGTGTCCAAGTTTTTA | (SEQ ID NO: 4292) |
| | | | | | TTTAGAACCCTTGTTAGCCAGACCG | (SEQ ID NO: 4293) |
| | | | | | TAGCCAGACCGAGGTGTCCTGGTCA | (SEQ ID NO: 4294) |
| | | | | | ACCATCATGCTTTGATGTTCCCCTG | (SEQ ID NO: 4295) |
| 200629_at | WARS | GAMMA-2, | tryptophanyl- | 7453 | TCCAGTTTACTGAACTCCAGACCAT | (SEQ ID NO: 4296) |
| | | IF153, IFP53 | tRNA | | CCAGACCATGCATGTAGTCCACTCC | (SEQ ID NO: 4297) |
| | | | synthetase | | TGCAGAGTCAGGGTGGCTTTTCCCC | (SEQ ID NO: 4298) |
| | | | | | CTGTGTCCGATGCCAAGGAGTCCTG | (SEQ ID NO: 4299) |
| | | | | | GGACGGGTGGACTTAGCTAGGGAGA | (SEQ ID NO: 4300) |
| | | | | | AAGTCGAGGCAGCAGCCCTCGAGGC | (SEQ ID NO: 4301) |
| | | | | | TCGAGGCCCTCACAGATGTCTAGGC | (SEQ ID NO: 4302) |
| | | | | | GTCTAGGCAGGCCTCATTTCATCAC | (SEQ ID NO: 4303) |
| | | | | | ATTTCATCACGCAGCATGTGCAGGC | (SEQ ID NO: 4304) |
| | | | | | ATCTCAGGGAAGTCCTTGGTTGATG | (SEQ ID NO: 4305) |
| | | | | | TTGGTTGATGTATCTGGGTCTCCTC | (SEQ ID NO: 4306) |
| 200877_at | CCT4 | CCT-DELTA, | chaperonin | 10575 | GTGGTATGGAATCCTACTGCGTTCG | (SEQ ID NO: 4307) |
| | | Cctd, | containing | | GCGTTCGTGCTTTTGCAGATGCTAT | (SEQ ID NO: 4308) |
| | | MGC126164, | TCP1, | | GTCATTCCATCTACACTAGCTGAAA | (SEQ ID NO: 4309) |
| | | MGC126165, | subunit 4 | | CTAGCTGAAAATGCCGGCCTGAATC | (SEQ ID NO: 4310) |
| | | SRB | (delta) | | GGCCTGAATCCCATTTCTACAGTAA | (SEQ ID NO: 4311) |
| | | | | | GAACTAAGAAACCGGCATGCCCAGG | (SEQ ID NO: 4312) |
| | | | | | TGGAGGAACTGGTTGTCCAGCCTCT | (SEQ ID NO: 4313) |
| | | | | | CCAGCCTCTGTTGGTATCAGTCAGT | (SEQ ID NO: 4314) |
| | | | | | CAGTGCTCTGACTCTTGCAACTGAA | (SEQ ID NO: 4315) |
| | | | | | GACTAGCACCATTATGATCACCAGT | (SEQ ID NO: 4316) |
| | | | | | TCTGGGCTTGGTCTTCCAGTTGGCA | (SEQ ID NO: 4317) |
| 201322_at | ATP5B | ATPMB, | ATP | 506 | TTGGATGCTACCACTGTACTGTCGC | (SEQ ID NO: 4318) |
| | | ATPSB, | synthase, H+ | | TCGCGTGCCATTGCTGAGCTGGGCA | (SEQ ID NO: 4319) |
| | | MGC5231 | transporting, | | AGCTGTGGATCCTCTAGACTCCACC | (SEQ ID NO: 4320) |
| | | | mitochondrial | | GTGAGCATTACGATGTTGCCCGTGG | (SEQ ID NO: 4321) |
| | | | F1 complex, | | TCCTGCAGGACTACAAATCCCTCCA | (SEQ ID NO: 4322) |
| | | | beta | | GAAGACAAGTTGACCGTGTCCCGTG | (SEQ ID NO: 4323) |
| | | | polypeptide | | TTGTCTCAGCCATTCCAGGTTGCTG | (SEQ ID NO: 4324) |
| | | | | | GAGGTCTTCACAGGTCATATGGGGA | (SEQ ID NO: 4325) |
| | | | | | GAAGCTGGTACCCCTGAAGGAGACC | (SEQ ID NO: 4326) |
| | | | | | ACAGGCCTTCTATATGGTGGGACCC | (SEQ ID NO: 4327) |
| | | | | | TCGTGAGGGGTCTTTGTCCTCTGTA | (SEQ ID NO: 4328) |
| 201562_s_{—} | SORD | SORD1 | sorbitol | 6652 | GATGTTAATGGGCTCTGCTCATCCC | (SEQ ID NO: 4329) |
| at | | | dehydrogenase | | GGGTGGGCTCTGATGCAGAACTTTC | (SEQ ID NO: 4330) |
| | | | | | GGAACTTGTAGCCAGAATGCCCTGT | (SEQ ID NO: 4331) |
| | | | | | GAATGCCCTGTTCATGCTGAGCAAA | (SEQ ID NO: 4332) |
| | | | | | TTCTTCCTGGAGTGCCTTCATTGAG | (SEQ ID NO: 4333) |
| | | | | | TCCACTGCTACTGACCCAGAGGGGA | (SEQ ID NO: 4334) |
| | | | | | TCATGAAGACTTAACTGGCCCAGAA | (SEQ ID NO: 4335) |
| | | | | | AAAATCTGCCACTCAGGGTCTGGGA | (SEQ ID NO: 4336) |
| | | | | | GGGTCTGGGATGAAGGCTTGTCAGC | (SEQ ID NO: 4337) |
| | | | | | GCTTGTCAGCACTTCCAGTTTAGAA | (SEQ ID NO: 4338) |
| | | | | | GAAAAGGCATCACTTTCCTGGATCC | (SEQ ID NO: 4339) |
| 201646_at | UBE2L6 | MGC40331, | ubiquitin- | 9246 | GTGTGTTGTGTATGGACTCACTCCC | (SEQ ID NO: 4340) |
| | | RIG-B, UBCH8 | conjugating | | CCTTTACATTCCCCAGAGCCAAGGG | (SEQ ID NO: 4341) |
| | | | enzyme E2L6 | | GTTTGCAGTTACAGGCCAGTTCTCC | (SEQ ID NO: 4342) |
| | | | | | TTCTCCAGCTCTCCATCTTAGAGAG | (SEQ ID NO: 4343) |
| | | | | | TGAATCCAGCAGCCAACTCGAATCC | (SEQ ID NO: 4344) |
| | | | | | CCCCCTAGGGCTCAGGCACTGAGGG | (SEQ ID NO: 4345) |
| | | | | | GGAGGGTACCCTATTTACAACTGAG | (SEQ ID NO: 4346) |
| | | | | | GAGTCAGCCAAGCCACTGATGGGAA | (SEQ ID NO: 4347) |
| | | | | | GTATATATCCTCCAGCATTCAGTCC | (SEQ ID NO: 4348) |
| | | | | | CCAGGGGGAGCCACGGAAACCATGT | (SEQ ID NO: 4349) |
| | | | | | GAAACCATGTTCTTGCTTAAGCCAT | (SEQ ID NO: 4350) |
| 201762_s_{—} | PSME2 | PA28B, | proteasome | 5721 | CAACACCTGATCCCCAAGATTGAAG | (SEQ ID NO: 4351) |
| at | | PA28beta, | (prosome, | | GGGGTAGCAATCCAGGAGAAGGTGC | (SEQ ID NO: 4352) |
| | | REGbeta | macropain) | | GAGAGGGTGAATGCCGTCAAGACCA | (SEQ ID NO: 4353) |
| | | | activator | | GAAGCTTTCCAGACAACCATTTCCA | (SEQ ID NO: 4354) |
| | | | subunit 2 | | GACAACCATTTCCAAGTACTTCTCA | (SEQ ID NO: 4355) |
| | | | (PA28 beta) | | GGCCTCCAAGGAGACTCATGTAATG | (SEQ ID NO: 4356) |
| | | | | | AATGGATTACCGGGCCTTGGTGCAT | (SEQ ID NO: 4357) |
| | | | | | GCCTTGGTGCATGAGCGAGATGAGG | (SEQ ID NO: 4358) |
| | | | | | TATGGGGAGCTCAGGGCCATGGTGC | (SEQ ID NO: 4359) |
| | | | | | GGGCCTTCTATGCTGAGCTTTATCA | (SEQ ID NO: 4360) |
| | | | | | CTTTATCATATCATCAGCAGCAACC | (SEQ ID NO: 4361) |
| 201782_s_{—} | AIP | ARA9, | aryl | 9049 | GTGCCACTTATCCACCAGGAGGGCA | (SEQ ID NO: 4362) |
| at | | FKBP16, | hydrocarbon | | AGGAGGCTGCTGCCAAGTACTACGA | (SEQ ID NO: 4363) |
| | | FKBP37, | receptor | | CAAGTACTACGATGCCATTGCCTGC | (SEQ ID NO: 4364) |
| | | SMTPHN, | interacting | | CATTGCCTGCCTCAAGAACCTGCAG | (SEQ ID NO: 4365) |
| | | XAP2 | protein | | CCTGGGTCCCCTGAATGGATCCAGC | (SEQ ID NO: 4366) |
| | | | | | GAGGAGTACTACGAGGTGCTGGACC | (SEQ ID NO: 4367) |
| | | | | | GTCAAGGCCTACTTCAAGCGGGGCA | (SEQ ID NO: 4368) |
| | | | | | CGGCCGTGTGGAATGCCCAGGAGGC | (SEQ ID NO: 4369) |
| | | | | | GCCTGTGGTGAGCCGAGAGCTGCGG | (SEQ ID NO: 4370) |
| | | | | | CCTGGAGGCACGGATCCGGCAGAAG | (SEQ ID NO: 4371) |
| | | | | | GGGATCTTCTCCCATTGACAGGAGC | (SEQ ID NO: 4372) |
| 201890_at | RRM2 | R2, RR2M | ribonucleotide | 6241 | GCTACTTTGAATTAATCTGCCTTTA | (SEQ ID NO: 4373) |
| | | | reductase | | TTGATCTTTTGGCCCCATTTGTTAA | (SEQ ID NO: 4374) |
| | | | M2 | | TTGGCCCCATTTGTTAATTGTATTC | (SEQ ID NO: 4375) |
| | | | polypeptide | | GTATTCAGTATTTGAACGTCGTCCT | (SEQ ID NO: 4376) |
| | | | | | GAACGTCGTCCTGTTTATTGTTAGT | (SEQ ID NO: 4377) |
| | | | | | GTTAATCCAGATTATATGGTCCTTA | (SEQ ID NO: 4378) |
| | | | | | TATGGTCCTTATATGTGTACAACAT | (SEQ ID NO: 4379) |
| | | | | | GTCTTGCATTGTGAGGTACAGGCGG | (SEQ ID NO: 4380) |
| | | | | | GTACAGGCGGAAGTTGGAATCAGGT | (SEQ ID NO: 4381) |
| | | | | | TTAGGATTCTGTCTCTCATTAGCTG | (SEQ ID NO: 4382) |
| | | | | | ATGTGAGGATTAACTTCTGCCAGCT | (SEQ ID NO: 4383) |
| 201932_at | LRRC41 | MGC126571, | leucine rich | 10489 | CTGGCTGGACCAGGATGCAGTCACA | (SEQ ID NO: 4384) |
| | | MGC126573, | repeat | | GGCTACCTGCCATGTGGTTAGCGAC | (SEQ ID NO: 4385) |
| | | MUF1, | containing 41 | | TGGTTAGCGACTCATGGACTCATCC | (SEQ ID NO: 4386) |
| | | PP7759, RP4- | | | TCCCAGGCCTTCGCAGATTATGTTA | (SEQ ID NO: 4387) |
| | | 636H5.2 | | | CGGTACCATCAGCTTGCAGGGGCTG | (SEQ ID NO: 4388) |
| | | | | | TGCAGGGGCTGAAGCATGGGCTGCC | (SEQ ID NO: 4389) |
| | | | | | GAGGCCCAGCAAACAGGCATTCTCA | (SEQ ID NO: 4390) |
| | | | | | GGCATTCTCACAGCTGGGTTTATAG | (SEQ ID NO: 4391) |
| | | | | | CTCAGTATCCTGGGAACCCTGGGCC | (SEQ ID NO: 4392) |
| | | | | | ATAATTGCTGAAGAGATCCCCTCCC | (SEQ ID NO: 4393) |
| | | | | | TCAAACCCTTTCATACCTTTATTCT | (SEQ ID NO: 4394) |
| 201947_s_{—} | CCT2 | 99D8.1, CCT- | chaperonin | 10576 | GAAGCTGTTGCAATGGAGTCTTATG | (SEQ ID NO: 4395) |
| at | | beta, CCTB, | containing | | ATGTTGCCAACCATCATAGCTGACA | (SEQ ID NO: 4396) |
| | | MGC142074, | TCP1, | | GCTATGACAGTGCAGACCTGGTGGC | (SEQ ID NO: 4397) |
| | | MGC142076, | subunit 2 | | GCTCAGGGCTGCTCACAGTGAAGGC | (SEQ ID NO: 4398) |
| | | PRO1633, | (beta) | | GAAGGCAATACCACTGCTGGATTGG | (SEQ ID NO: 4399) |
| | | TCP-1-beta | | | AGATATGGCTATCCTGGGTATAACA | (SEQ ID NO: 4400) |
| | | | | | AGGTGATTCTGCGTGTGGACAACAT | (SEQ ID NO: 4401) |
| | | | | | GGACAACATCATCAAAGCGGCACCC | (SEQ ID NO: 4402) |
| | | | | | ACGTGCTGTCGATCTTTGGACCAGT | (SEQ ID NO: 4403) |
| | | | | | GACCAGTTTCTAGCAAAGTTGTGTT | (SEQ ID NO: 4404) |
| | | | | | ATTTAGCTGACCTTCGCTTTAACAT | (SEQ ID NO: 4405) |
| 202168_at | TAF9 | AD-004, AK6, | TAF9 RNA | 6880 | AAAAGGCATCAACTTCTGCGGGAAG | (SEQ ID NO: 4406) |
| | | CGI-137, | polymerase | | GTCCCGCGGTTAAGTGTTGGTTCAG | (SEQ ID NO: 4407) |
| | | CINAP, CIP, | II, TATA box | | TACTAGCAGACCAAGTACTCCCACA | (SEQ ID NO: 4408) |
| | | MGC1603, | binding | | AAAGTAGGGACTCCCATGTCCCTCA | (SEQ ID NO: 4409) |
| | | MGC3647, | protein | | AGTACAGATGCCTACTTCTCAGTCT | (SEQ ID NO: 4410) |
| | | MGC5067, | (TBP)- | | CTACTTCTCAGTCTCCAGCTGTAAA | (SEQ ID NO: 4411) |
| | | MGD: 1603, | associated | | GTAAAAGCTTCAATTCCTGCAACCT | (SEQ ID NO: 4412) |
| | | MGC: 3647, | factor, 32 kDa | | AATCCATCATTAATCGGGTCCAAAA | (SEQ ID NO: 4413) |
| | | MGC:5067, | | | GTCCAAAAACATTCTTATTACCACT | (SEQ ID NO: 4414) |
| | | TAF2G, | | | GATAATCTGTAATCTAGCCTTGCTG | (SEQ ID NO: 4415) |
| | | TAFII31, | | | AACACAGTTACCATACTTTTCAATT | (SEQ ID NO: 4416) |
| | | TAFII32, | | | | |
| | | TAFIID32 | | | | |
| 202455_at | HDAC5 | FLJ90614, | histone | 10014 | ACGAGTTCTCACCTGATGTGGTCCT | (SEQ ID NO: 4417) |
| | | HD5, NY-CO-9 | deacetylase | | GTCACCGCCAGATGTTTTGGCCACT | (SEQ ID NO: 4418) |
| | | | 5 | | TTTGGCCACTTGACCAGGCAGCTGA | (SEQ ID NO: 4419) |
| | | | | | CTGATGACCCTGGCAGGGGGCCGGG | (SEQ ID NO: 4420) |
| | | | | | GTCTCGGCTCTGCTCAGTGTAGAGC | (SEQ ID NO: 4421) |
| | | | | | GCAGCCCTTGGATGAGGCAGTCTTG | (SEQ ID NO: 4422) |
| | | | | | AAAGCCCAACATCAACGCAGTGGCC | (SEQ ID NO: 4423) |
| | | | | | CGCAGTGGCCACGCTAGAGAAAGTC | (SEQ ID NO: 4424) |
| | | | | | GTCATCGAGATCCAGAGCAAACACT | (SEQ ID NO: 4425) |
| | | | | | AAGCAGGTGAGACCGAGGAGGCCGA | (SEQ ID NO: 4426) |
| | | | | | CATGGAGCAGGAGCCTGCCCTGTGA | (SEQ ID NO: 4427) |
| 202565_s_{—} | SVIL | RP11- | supervillin | 6840 | ATATGTATTCATTCACTTTCAAGAT | (SEQ ID NO: 4428) |
| at | | 534G20.1, | | | CTTCTGTTGAATTAGCTCTGCCACC | (SEQ ID NO: 4429) |
| | | DKFZp686A17191 | | | AGCTCTGCCACCAATATGTATCTTC | (SEQ ID NO: 4430) |
| | | | | | GTATCTTCATACACGTTTGGAAATG | (SEQ ID NO: 4431) |
| | | | | | GGAAATGTTTCCTGCAGCATTAGGT | (SEQ ID NO: 4432) |
| | | | | | GCATTAGGTATGACTTGTTCTGAGT | (SEQ ID NO: 4433) |
| | | | | | TGAGTACTGCTTCCGGTGCTAAAAT | (SEQ ID NO: 4434) |
| | | | | | TTAATGGCATGGACTCTGGAGAATC | (SEQ ID NO: 4435) |
| | | | | | TATGCGAATCAACCTTTCTACCTTA | (SEQ ID NO: 4436) |
| | | | | | TCTACCTTAATATCTCCCCAAAAAT | (SEQ ID NO: 4437) |
| | | | | | GTTTGCTCTGCATTTTTGATGATGG | (SEQ ID NO: 4438) |
| 202705_at | CCNB2 | HsT17299 | cyclin B2 | 9133 | GCCACTACACTTCTTAAGGCGAGCA | (SEQ ID NO: 4439) |
| | | | | | GCGAGCATCAAAAGCCGGGGAGGTT | (SEQ ID NO: 4440) |
| | | | | | ATGGAGCTGACTCTCATCGACTATG | (SEQ ID NO: 4441) |
| | | | | | ATATGGTGCATTATCATCCTTCTAA | (SEQ ID NO: 4442) |
| | | | | | ATCCTTCTAAGGTAGCAGCAGCTGC | (SEQ ID NO: 4443) |
| | | | | | ACTTAACTAAATTCATCGCCATCAA | (SEQ ID NO: 4444) |
| | | | | | CAAAAGCCGTCAAAGACCTTGCCTC | (SEQ ID NO: 4445) |
| | | | | | CTTGCCTCCCCACTGATAGGAAGGT | (SEQ ID NO: 4446) |
| | | | | | GATAGGAAGGTCCTAGGCTGCCGTG | (SEQ ID NO: 4447) |
| | | | | | GATTTTGTACATAGTCCTCTGGTCT | (SEQ ID NO: 4448) |
| | | | | | AGTCCTCTGGTCTATCTCATGAAAC | (SEQ ID NO: 4449) |
| 202806_at | DBN1 | D0S1173, | drebrin 1 | 1627 | ATAGGAGACTTGTACAGTTGACTGG | (SEQ ID NO: 4450) |
| | | DKFZp434D064 | | | GGCTTTCCTCTCGTTGGTAGTTGAG | (SEQ ID NO: 4451) |
| | | | | | TGAGACGCTGTTGCAAATTCCACCC | (SEQ ID NO: 4452) |
| | | | | | TCCTTCCCTGGTCCAGATTGTAGCT | (SEQ ID NO: 4453) |
| | | | | | TCCAGATTGTAGCTCTTAGTCCTCC | (SEQ ID NO: 4454) |
| | | | | | TCAGCTGGCCGGGTTGGAGGCCTCA | (SEQ ID NO: 4455) |
| | | | | | GCTCTGGTGGGAAAATGTCCCCCAC | (SEQ ID NO: 4456) |
| | | | | | GTTTCTTGGGAAAATATCACTTTGT | (SEQ ID NO: 4457) |
| | | | | | ATATCACTTTGTATTCTCTGTCCAG | (SEQ ID NO: 4458) |
| | | | | | TTTGTATTCTCTGTCCAGGGCTTCA | (SEQ ID NO: 4459) |
| | | | | | CCAGGGCTTCAGATATTTTGCACGA | (SEQ ID NO: 4460) |
| 202875_s_{—} | PBX2 | DAAP- | pre-B-cell | 5089 | CTCCCTAACGAGACTCTCTGTGCTG | (SEQ ID NO: 4461) |
| at | | 218M18.5, | leukemia | | GTGCTGGGGGTGCTAATTACATGGC | (SEQ ID NO: 4462) |
| | | G17, HOX12, | homeobox 2 | | GAATGGGGCCTCTAAGGGGAGTGTG | (SEQ ID NO: 4463) |
| | | PBX2MHC | | | GAGAAACCTATTTCTCAGACCCCTT | (SEQ ID NO: 4464) |
| | | | | | ACCCCACTTGTATGCTCTGGAATCT | (SEQ ID NO: 4465) |
| | | | | | ATGGGGACATGACTTCTGGACAGAG | (SEQ ID NO: 4466) |
| | | | | | TACCTCATACGCAGCTCATCTTAAA | (SEQ ID NO: 4467) |
| | | | | | CTCGGTGGACGAGAGTGTCTGACTC | (SEQ ID NO: 4468) |
| | | | | | GTCTGACTCAGATATCTACCTCGGA | (SEQ ID NO: 4469) |
| | | | | | ACCTCGGAGGGAGTTTCTGCTACTT | (SEQ ID NO: 4470) |
| | | | | | AGGGAATTATTGACTGGGCTTTGGG | (SEQ ID NO: 4471) |
| 203210_s_{—} | RFC5 | MGC1155, | replication | 5985 | ATGCGTAGGGCTCTGAACATTTTGC | (SEQ ID NO: 4472) |
| at | | RFC36 | factor C | | CAGAGGAGACTGTCTACACCTGCAC | (SEQ ID NO: 4473) |
| | | | (actibator 1) | | CACCCGCTCAAGTCAGACATTGCCA | (SEQ ID NO: 4474) |
| | | | 5, 36.5 kDa | | ATAGAGTTGACTTTCCATCTTCAGT | (SEQ ID NO: 4475) |
| | | | | | GAGTACAGGCTTTCTGTTGGCACCA | (SEQ ID NO: 4476) |
| | | | | | ACGAGAAGATCCAGCTGAGCTCCCT | (SEQ ID NO: 4477) |
| | | | | | GCTGCATTTCAAGTCACCAGAGACC | (SEQ ID NO: 4478) |
| | | | | | GAGACCTGATTGTTGCAGAGGCCTA | (SEQ ID NO: 4479) |
| | | | | | GCCTAGATGCTCTGAGGGCCATTCA | (SEQ ID NO: 4480) |
| | | | | | GGGCCATTCACAATTCTCAGGGCTC | (SEQ ID NO: 4481) |
| | | | | | ATCAGTCACCCCGAATCTTGGAAAA | (SEQ ID NO: 4482) |
| 203327_at | IDE | RP11- | insulin- | 3416 | TCATCACTTCCTTCTGGTTTTATGT | (SEQ ID NO: 4483) |
| | | 366I13.1, | degrading | | TTCCGATCCACCACTGTACTAGTAA | (SEQ ID NO: 4484) |
| | | FLJ35968, | enzyme | | GTCTTCCATGAACCTGCAATTGTTT | (SEQ ID NO: 4485) |
| | | INSULYSIN | | | TATGCGTCAGCATTTTCCAATTTCC | (SEQ ID NO: 4486) |
| | | | | | AGGTTGGATCTAGAGCTGCTGTTGA | (SEQ ID NO: 4487) |
| | | | | | GCTGCTGTTGATCACTCAGGCATAC | (SEQ ID NO: 4488) |
| | | | | | GTCCAAGCTGCAGTCCATGAGCAAT | (SEQ ID NO: 4489) |
| | | | | | CATGAGCAATAACAGACTACCCCAG | (SEQ ID NO: 4490) |
| | | | | | GACTACCCCAGATACTGCAGTTTAC | (SEQ ID NO: 4491) |
| | | | | | GAAAGTCTTCTTTTTTGACCAGTTG | (SEQ ID NO: 4492) |
| | | | | | GAGGGAGCATGTGACACAGCCAGTA | (SEQ ID NO: 4493) |
| 203362_s_{—} | MAD2L1 | HSMAD2, | MAD2 mitotic | 4085 | AAATGATACTTACTGAACTGTGTGT | (SEQ ID NO: 4494) |
| at | | MAD2 | arrest | | GTACCTATTTGACTTACCATGGAGT | (SEQ ID NO: 4495) |
| | | | deficient- | | GGAGGTTTTTTTGTCAACATTGTGA | (SEQ ID NO: 4496) |
| | | | like | | AAGCTAGATGCTTTCCTAAATCAGA | (SEQ ID NO: 4497) |
| | | | 1 (yeast) | | CAGAATCTTTGTTAAGGTCCTGAAA | (SEQ ID NO: 4498) |
| | | | | | AGGTCCTGAAAGTAACTCATAATCT | (SEQ ID NO: 4499) |
| | | | | | ATTGCTGTATAGCTCCTTTTGACCT | (SEQ ID NO: 4500) |
| | | | | | CTCCTTTTGACCTTCATTTCATGTA | (SEQ ID NO: 4501) |
| | | | | | ATTTCATGTATAGTTTTCCCTATTG | (SEQ ID NO: 4502) |
| | | | | | GTTTTCCCTATTGAATCAGTTTCCA | (SEQ ID NO: 4503) |
| | | | | | ATTTGTACTGTTTAATGTTCTGTGA | (SEQ ID NO: 4504) |
| 203396_at | PSMA4 | HC9, | proteasome | 5685 | GGCTTTCAGCTCTATCAGAGTGACC | (SEQ ID NO: 4505) |
| | | HsT17706, | (prosome, | | AGAGTGACCCTAGTGGAAATTACGG | (SEQ ID NO: 4506) |
| | | MGC111191, | macropain) | | GGGGGATGGAAGGCCACATGCATTG | (SEQ ID NO: 4507) |
| | | MGC12467, | subunit, | | GAAATAATAGCGCTGCAGCTGTGTC | (SEQ ID NO: 4508) |
| | | MGC24813, | alpha type, 4 | | GCGCTGCAGCTGTGTCAATGTTGAA | (SEQ ID NO: 4509) |
| | | PSC9 | | | GAAATGACCTTGAAGTCAGCACTTG | (SEQ ID NO: 4510) |
| | | | | | CATGGATGTTAGTAAACTCTCTGCT | (SEQ ID NO: 4511) |
| | | | | | AAGACAGTAATCAGAGTTCTCAAAC | (SEQ ID NO: 4512) |
| | | | | | TACTGAATTGGGTCCTTGTCATTTC | (SEQ ID NO: 4513) |
| | | | | | GTCCTTGTCATTTCTGTCCAATTGA | (SEQ ID NO: 4514) |
| | | | | | TACCCTTCATGGACGTCTTAATCTT | (SEQ ID NO: 4515) |
| 203478_at | NDUFC1 | KFYI, | NADH | 4717 | GGGGCCCAAGGAATTCGCAAGATGG | (SEQ ID NO: 4516) |
| | | MGC117464, | dehydrogenase | | AGGAATTCGCAAGATGGCGCCGTCC | (SEQ ID NO: 4517) |
| | | MGC126847, | (ubiquinone) | | GCCCTTCAGTGCGATCAAAGTTCTA | (SEQ ID NO: 4518) |
| | | MGC138266 | 1, | | GTGCGATCAAAGTTCTACGTGCGAG | (SEQ ID NO: 4519) |
| | | | subcomplex | | TTCTACGTGCGAGAGCCGCCGAATG | (SEQ ID NO: 4520) |
| | | | unknow, 1, | | CCGCCGAATGCCAAACCTGACTGGC | (SEQ ID NO: 4521) |
| | | | 6 kDa | | ACCTGACTGGCTGAAAGTTGGGTTC | (SEQ ID NO: 4522) |
| | | | | | TGAAAGTTGGGTTCACCTTGGGCAC | (SEQ ID NO: 4523) |
| | | | | | GTCTTCTTGTGGATCTATCTCATCA | (SEQ ID NO: 4524) |
| | | | | | GGATCTATCTCATCAAACAACACAA | (SEQ ID NO: 4525) |
| | | | | | CAAGCCAGCATTTGTATTTTGCATC | (SEQ ID NO: 4526) |
| 203682_s_{—} | IVD | ACAD2 | isovaleryl | 3712 | GAAGTAGAGATGTGGCGGCTTTCCC | (SEQ ID NO: 4527) |
| at | | | Coenzyme A | | GAGGTTGAGTTCTCCACAACAGCTC | (SEQ ID NO: 4528) |
| | | | dehydrogenase | | AACAGCTCCCAAGCATCATGGGCCT | (SEQ ID NO: 4529) |
| | | | | | CTGTGCCACGGCTAGTGTTGTGTGA | (SEQ ID NO: 4530) |
| | | | | | CACCTCCCAGGGTAGGCACCTGGGG | (SEQ ID NO: 4531) |
| | | | | | CCACCTCCCAGGGTAGGCACCTGGG | (SEQ ID NO: 4532) |
| | | | | | ACCTCTTTCTCTTGGGTGAGGCTCT | (SEQ ID NO: 4533) |
| | | | | | GAGGCTCTGGCAAGGAGATCTCTCT | (SEQ ID NO: 4534) |
| | | | | | AGATCTCTCTGCTCAAGCACAGCAG | (SEQ ID NO: 4535) |
| | | | | | GGCCCCTCTCCATGAATTGGAACTT | (SEQ ID NO: 4536) |
| | | | | | TCAACTTTCAGTCTCTTTTCTGGGG | (SEQ ID NO: 4537) |
| 204228_at | PPIH | KFYI, | peptidylprolyl | 10465 | ATGGAGATGGTACTGGAGTCGCCAG | (SEQ ID NO: 4538) |
| | | MGC117464, | isomerase H | | TCGCCAGTATTTACCGGGGGCCATT | (SEQ ID NO: 4539) |
| | | MGC126847, | (cyclophilin | | TTTAAACTTAGACACTCAGCTCCAG | (SEQ ID NO: 4540) |
| | | MGC138266 | H) | | GCTTTCCATGGCGAACAGTGGTCCA | (SEQ ID NO: 4541) |
| | | | | | ATCACCTGCTCTAAGTGCGATTGGC | (SEQ ID NO: 4542) |
| | | | | | AAAATCATCGATGGACTTCTAGTGA | (SEQ ID NO: 4543) |
| | | | | | TTCCCACAGGCCCCAACAATAAGCC | (SEQ ID NO: 4544) |
| | | | | | CTACCTGTGGTGATCTCGCAGTGTG | (SEQ ID NO: 4545) |
| | | | | | AAAGACTGAATCAGGCCTTCCCTTC | (SEQ ID NO: 4546) |
| | | | | | AGTAAGATAATCTGGACTGGCCCCC | (SEQ ID NO: 4547) |
| | | | | | CTGCTGCCCCATTTGATCAAGAGAC | (SEQ ID NO: 4548) |
| 204321_at | NEO1 | DKFZp547A066, | neogenine | 4756 | GAAGCCTGTGTCGAGGCAGCTTCCC | (SEQ ID NO: 4549) |
| | | DKFZp547B146, | homolog 1 | | TCCCTTTGCCTGCTGATATTCTGCA | (SEQ ID NO: 4550) |
| | | HsT17534, | (chicken) | | GCAACCTGCATTTCACTTTGTGGTC | (SEQ ID NO: 4551) |
| | | NGN | | | TTTCACTTTGTGGTCAGGCCGTGTC | (SEQ ID NO: 4552) |
| | | | | | CGTGTCTTTGTGCTGTGACTGCATC | (SEQ ID NO: 4553) |
| | | | | | GTGACTGCATCACCTTTATGGAGTG | (SEQ ID NO: 4554) |
| | | | | | GTCCTTGGTGTTCTCCACAAGTGGT | (SEQ ID NO: 4555) |
| | | | | | GGTTGACATTTGACTGCTTGTTCCA | (SEQ ID NO: 4556) |
| | | | | | TTTGACAGTGTGGGTCGTTCCTGGG | (SEQ ID NO: 4557) |
| | | | | | TTCTGAGTCATTGCATCCTCTACCA | (SEQ ID NO: 4558) |
| | | | | | TCTACCAGCTGTTAATCCATCACTC | (SEQ ID NO: 4559) |
| 204533_at | CXCL10 | C7, IFI10, | chemokine | 3627 | TAACTCTACCCTGGCACTATAATGT | (SEQ ID NO: 4560) |
| | | INP10, IP-10, | (C-X-C motif) | | GCTCTACTGAGGTGCTATGTTCTTA | (SEQ ID NO: 4561) |
| | | SCYB10, crg- | ligand 10 | | TCTTAGTGGATGTTCTGACCCTGCT | (SEQ ID NO: 4562) |
| | | 2, gIP-10, | | | TCTGACCCTGCTTCAAATATTTCCC | (SEQ ID NO: 4563) |
| | | mob-1 | | | GGTACTAAGGAATCTTTCTGCTTTG | (SEQ ID NO: 4564) |
| | | | | | GCTTTGGGGTTTATCAGAATTCTCA | (SEQ ID NO: 4565) |
| | | | | | AATGCTCTTTACTTCATGGACTTCC | (SEQ ID NO: 4566) |
| | | | | | TTACTTCATGGACTTCCACTGCCAT | (SEQ ID NO: 4567) |
| | | | | | ATTCTTTCAGTGGCTACCTACATAC | (SEQ ID NO: 4568) |
| | | | | | GCTACCTACATACAATTCCAAACAC | (SEQ ID NO: 4569) |
| | | | | | AATGAGGTACTCTCCTGGAAATATT | (SEQ ID NO: 4570) |
| 205565_s_{—} | FXN | CyaY, FA, | frataxin | 2395 | AACTGTCAAACTGGGTGGAGATCTA | (SEQ ID NO: 4571) |
| at | | FARR, FRDA, | | | AGGAACCTATGTGATCAACAAGCAG | (SEQ ID NO: 4572) |
| | | MGC57199, | | | CAAGCAGACGCCAAACAAGCAAATC | (SEQ ID NO: 4573) |
| | | X25 | | | TTCTCCATCCAGTGGACCTAAGCGT | (SEQ ID NO: 4574) |
| | | | | | ATCCAGTGGACCTAAGCGTTATGAC | (SEQ ID NO: 4575) |
| | | | | | TTGGCCTATTCCGGAAAAGATGCTT | (SEQ ID NO: 4576) |
| | | | | | CGGAAAAGATGCTTGATGCCCAGCC | (SEQ ID NO: 4577) |
| | | | | | TAAGGACATTAAAAGCTATCAGGCC | (SEQ ID NO: 4578) |
| | | | | | TTGGGCTATGTGTCACAGCTCTGTA | (SEQ ID NO: 4579) |
| | | | | | TTTTGGATTGTCGGATTTCCTCCCT | (SEQ ID NO: 4580) |
| | | | | | TAATGTCTTATGCCTATACCTGAAT | (SEQ ID NO: 4581) |
| 205890_s_{—} | GABBR1/// | DAAP- | gamma- | 10537 | GATCTTAAAGCCACGGAGAAGCCTC | (SEQ ID NO: 4582) |
| at | UBD | 188P13.3, | aminobutyric | 2550 | TGCCCTTGTTTCTTGTGGAGTCAGG | (SEQ ID NO: 4583) |
| | | FLJ92613, | acid (GABA) | | ATGAGGCAAAGAGGCACCTCCTCCA | (SEQ ID NO: 4584) |
| | | GABAB(1e), | B receptor, | | GAAGGTCCAGCTCAGTGGCACAAGT | (SEQ ID NO: 4585) |
| | | GABABR1, | 1/// | | GACGGGTATAATCCCTGAGACCCAG | (SEQ ID NO: 4586) |
| | | GABBR1-3, | ubiquitin D | | GACCCAGATTGTGACTTGCAATGGA | (SEQ ID NO: 4587) |
| | | GPRC3A, | | | AGAAAGGGCAACTTACTCTTCCTGG | (SEQ ID NO: 4588) |
| | | dJ271M21.1.1, | | | ACTCTTCCTGGCATCTTATTGTATT | (SEQ ID NO: 4589) |
| | | dJ271M21.1.2, | | | AATCTCTTACTCAACGAACACATCT | (SEQ ID NO: 4590) |
| | | hGF1a/// | | | CATCTTCTGATGATTTCCCAAAATT | (SEQ ID NO: 4591) |
| | | DAMC- | | | ATTGCCCAACTCTATGTTTCTTTGA | (SEQ ID NO: 4592) |
| | | 346D16.1, | | | | |
| | | FAT10, | | | | |
| | | GABBR1, | | | | |
| | | UBD-3 | | | | |
| 205980_s_{—} | ARHGAP8/// | BPGAP1, | Rho GTPase | 23779 | GCCTGTGTCTTCGGGCTGAATTTGA | (SEQ ID NO: 4593) |
| at | LOC553158 | FLJ20185, | activating | 553158 | GTGTCTTCGGGCTGAATTTGATCTG | (SEQ ID NO: 4594) |
| | ///PRR5/// | PP610/// | protein 8/// | 55615 | TGAATTTGATCTGGCCATCCCAGGG | (SEQ ID NO: 4595) |
| | ARHGAP8 | LOC553158; | proline rich | | AGTCCCCTGATGGCAGCCAGAAGAC | (SEQ ID NO: 4596) |
| | | ARHGAP8/// | 5 (renal)/// | | TGATGGCAGCCAGAAGACGTCTCTA | (SEQ ID NO: 4597) |
| | | | PRR5- | | GGCAGCCAGAAGACGTCTCTAGTGT | (SEQ ID NO: 4598) |
| | | | ARHGAP8 | | GCCAGAAGACGTCTCTAGTGTTGCG | (SEQ ID NO: 4599) |
| | | | fusion | | GAAGACGTCTCTAGTGTTGCGAACA | (SEQ ID NO: 4600) |
| | | | | | GTCTCTAGTGTTGCGAACACTCTGT | (SEQ ID NO: 4601 |
| | | | | | TGTGCACTTGTATGTTTTGTAAACT | (SEQ ID NO: 4602) |
| | | | | | TTGTAAACTTGGCATCTGTAAAAAT | (SEQ ID NO: 4603) |
| 206289_at | HOXA4 | HOXA-4 | homeobox | 3201 | CCATCTGGACCATAATAGGGACACC | (SEQ ID NO: 4604) |
| | | | A4 | | CGGTTAAGAGTCTGTGCTGGTTGCC | (SEQ ID NO: 4605) |
| | | | | | GAGAACAGTTGTCCAGGATGCTGGC | (SEQ ID NO: 4606) |
| | | | | | ACAACCTGCTGGCCCGAAACAAGGC | (SEQ ID NO: 4607) |
| | | | | | AACAAGGCTGCCAGGTGTGGAACAG | (SEQ ID NO: 4608) |
| | | | | | AACAGCCCATGCTGACTGGGGACAT | (SEQ ID NO: 4609) |
| | | | | | GACTGGGGACATACACTTGCATCTT | (SEQ ID NO: 4610) |
| | | | | | CCCCATTAAGGCAGCTCATCCAAGC | (SEQ ID NO: 4611) |
| | | | | | GACATGTTAGTTTTTCTTACTTGCA | (SEQ ID NO: 4612) |
| | | | | | CAGAGATACTGTTGTCACCTTCTGG | (SEQ ID NO: 4613) |
| | | | | | GGGGAGTGCATTTAGACTTATGTGG | (SEQ ID NO: 4614) |
| 206441_s_{—} | COMMD4 | FLJ20452 | COMM | 54939 | GGAGCTGCTGGGACAGGGGATTGAT | (SEQ ID NO: 4615) |
| at | | | domain | | AGCTCACGGCTGACGCCAAGTTTGA | (SEQ ID NO: 4616) |
| | | | containing 4 | | TCCAGTGCGGCCAAGCACAGTGTCG | (SEQ ID NO: 4617) |
| | | | | | AGTGTCGATGGCGAATCCTTGTCCA | (SEQ ID NO: 4618) |
| | | | | | TCCTTGTCCAGTGAACTGCAGCAGC | (SEQ ID NO: 4619) |
| | | | | | AGCTGGGGCTGCCCAAAGAGCACGC | (SEQ ID NO: 4620) |
| | | | | | CCAGCCTGTGCCGCTGTTATGAGGA | (SEQ ID NO: 4621) |
| | | | | | CAAAGCCCCTTGCAGAAGCACTTGC | (SEQ ID NO: 4622) |
| | | | | | TGAACTGCTCTTCGGGAGGCAGCCC | (SEQ ID NO: 4623) |
| | | | | | GCCCTGGTTCTAGGATGCTGAGGCC | (SEQ ID NO: 4624) |
| | | | | | GCCTCACTTCTCTCTTGAGAACTTG | (SEQ ID NO: 4625) |
| 206752_s_{—} | DFFB | RP13- | DNA | 1677 | TGAACAGCTATCACGTTGAACCACG | (SEQ ID NO: 4626) |
| at | | 531C17.1, | fragmentation | | GAAACTGCTGTTTTCTAGGCCAAAA | (SEQ ID NO: 4627) |
| | | CAD, CPAN, | factor, | | TGTGTCACAGTTTCAGGCTTTTATG | (SEQ ID NO: 4628) |
| | | DFF-40, DFF2 | 40 kDa, beta | | TGGAAGCTGTTCAGGGCATCGGCAG | (SEQ ID NO: 4629) |
| | | DFF40 | polypeptide | | GGTCAGCGTTACTATCATCTCGGAT | (SEQ ID NO: 4630) |
| | | | (caspase- | | GGATCATATGGAGCTCATGTCAGCC | (SEQ ID NO: 4631) |
| | | | activated | | TCATGTCAGCCGTGTGGGTGGCGGG | (SEQ ID NO: 4632) |
| | | | DNase) | | GCGGGTGCACAGAGACGGTCTGGAA | (SEQ ID NO: 4633) |
| | | | | | GGAAGGAAACACGCGGATCTGAACA | (SEQ ID NO: 4634) |
| | | | | | GGTTGGGCTAGATTACAGAGGGCTC | (SEQ ID NO: 4635) |
| | | | | | TACAGAGGGCTCATTTTCTACGTCA | (SEQ ID NO: 4636) |
| 206966_s_{—} | KLF12 | AP-2rep, | Kruppel-like | 11278 | CCGCCTTCAAGTCCCATGAATTTAC | (SEQ ID NO: 4637) |
| at | | AP2REP, | factor 12 | | CAAACTGAGTCATGTTCACCGCATC | (SEQ ID NO: 4638) |
| | | HSPC122 | | | CATCCCCGTGGTGGTACAGTCGGTG | (SEQ ID NO: 4639) |
| | | | | | TGGTACAGTCGGTGCCTGTTGTCTA | (SEQ ID NO: 4640) |
| | | | | | GTCTACACAGCTGTAAGGTCACCTG | (SEQ ID NO: 4641) |
| | | | | | GAACAACACTATTGTCGTGCCGCTT | (SEQ ID NO: 4642) |
| | | | | | GTCGTGCCGCTTTTGGAGGATGGGA | (SEQ ID NO: 4643) |
| | | | | | TGGCAAAGCACAAATGGACCCCCGA | (SEQ ID NO: 4644) |
| | | | | | AGGCCTATCTCCCAGACAAAGTAAA | (SEQ ID NO: 4645) |
| | | | | | AAATGTGACCTTAGATAGCGTTAAT | (SEQ ID NO: 4646) |
| | | | | | CCCTTTCCATAGCCAGAGCAGTACA | (SEQ ID NO: 4647) |
| 207153_s_{—} | GLMN | FAP, FAP48, | glomulin, | 11146 | GAGTTTAGCTATGCTTCAGCTGTAT | (SEQ ID NO: 4648) |
| at | | FAP68, | FKBP | | TACAGGACCACAGTTGATTTCCCTT | (SEQ ID NO: 4649) |
| | | FKBPAP, | associated | | GATTTCCCTTCTTGATTTGGTACTT | (SEQ ID NO: 4650) |
| | | GLML, GVM, | protein | | CTCCCAGAGGGTGCAGAAACAGATT | (SEQ ID NO: 4651) |
| | | VMGLOM | | | AAAGCCACTTCATATAGGACTTAAT | (SEQ ID NO: 4652) |
| | | | | | TAGCCAAGAGGCCCAGAAATCTAAA | (SEQ ID NO: 4653) |
| | | | | | GAAGAGATCCCTAATATGCCTCCTG | (SEQ ID NO: 4654) |
| | | | | | AATATGCCTCCTGAAATGCAGCTTA | (SEQ ID NO: 4655) |
| | | | | | TTAAGGTCCTGCATTCAGCTCTTTT | (SEQ ID NO: 4656) |
| | | | | | TTGAAAGTGTTCTAGCTCGAGTGGA | (SEQ ID NO: 4657) |
| | | | | | ATAAAAACAAAGTCTACCTCTGAAG | (SEQ ID NO: 4658) |
| 207181_s_{—} | CASP7 | CMH-1, ICE- | caspase 7, | 840 | GGGAGTTAGGACCACCAATGGATTG | (SEQ ID NO: 4659) |
| at | | LAP3, MCH3 | apoptosis- | | GAGATGGAGTGAGCTGAGACAGATA | (SEQ ID NO: 4660) |
| | | | related | | CTTACTGCCCAGGCCTATCTGGAAG | (SEQ ID NO: 4661) |
| | | | cysteine | | GAAATGGATGTAAGCCTGGCCCATA | (SEQ ID NO: 4662) |
| | | | peptidase | | AAGCCTGGCCCATAATGTGAACATA | (SEQ ID NO: 4663) |
| | | | | | AAGTAATCACTAATGCTCAACAATT | (SEQ ID NO: 4664) |
| | | | | | GCTCAACAATTTATCCATTCAATCA | (SEQ ID NO: 4665) |
| | | | | | TTCATTGGGTTGTCAGATAGTCTAT | (SEQ ID NO: 4666) |
| | | | | | TTTAGATTATTCCAAGCCTTATTTT | (SEQ ID NO: 4667) |
| | | | | | GATTTTTGGCACTTTGTTTTCAAGA | (SEQ ID NO: 4668) |
| | | | | | TTTTCTGCCTAATAGTAACTGGTTA | (SEQ ID NO: 4669) |
| 207469_s_{—} | PIR | 0 | pirin (iron- | 8544 | ACTCGCACACCAACCTTATATTTGG | (SEQ ID NO: 4670) |
| at | | | binding | | GGACTTCAAATTGGACCCAGGAGCC | (SEQ ID NO: 4671) |
| | | | nuclear | | GGACAAGCTTCATTTACACGATATC | (SEQ ID NO: 4672) |
| | | | protein) | | GGAGATGTGTATATTGGGCCCGATG | (SEQ ID NO: 4673) |
| | | | | | ATTGGGCCCGATGATGCACAACAAA | (SEQ ID NO: 4674) |
| | | | | | CTCATCACACAGCAGTGCTTGGAGA | (SEQ ID NO: 4675) |
| | | | | | GAAGCCACTTTGTCTTAATTGCTGG | (SEQ ID NO: 4676) |
| | | | | | GAGAACCAGTTATCCAACATGGTCC | (SEQ ID NO: 4677) |
| | | | | | CGGAAGAGCAGGTCTTGATGTGTCC | (SEQ ID NO: 4678) |
| | | | | | GAAGGCATTCCATTTCTAAAGCTTA | (SEQ ID NO: 4679) |
| | | | | | GCTTCTAAAGAATTCCACACTAACG | (SEQ ID NO: 4680) |
| 207507_s_{—} | ATP5G3 | MGC125738, | ATP | 518 | CGCGCAGTCCCGAAGAGTGTAAGAT | (SEQ ID NO: 4681) |
| at | | P3 | synthase, H+ | | CCTCTCTGATCCGAGCTGGATCCAG | (SEQ ID NO: 4682) |
| | | | transporting, | | GCATACAGACCAATTTCTGCATCAG | (SEQ ID NO: 4683) |
| | | | mitochondrial | | TGCATCAGTGTTATCTCGACCAGAG | (SEQ ID NO: 4684) |
| | | | F0 complex, | | ATCTCGACCAGAGGCTAGTAGGACT | (SEQ ID NO: 4685) |
| | | | subunit C3 | | TGGGGCCCAGAATGGTGTGTCTCAG | (SEQ ID NO: 4686) |
| | | | (subunit 9) | | GTGTCTCAGCTAATCCAAAGGGAGT | (SEQ ID NO: 4687) |
| | | | | | TTGTTTGATGGTTGCTTTCTTGATT | (SEQ ID NO: 4688) |
| | | | | | ACTGCTTGACATGTTGGCATTCATA | (SEQ ID NO: 4689) |
| | | | | | TGTGTATCTTACTGTGACTCCGAAA | (SEQ ID NO: 4690) |
| | | | | | AAAACTGTAGTATTGGTGTCATGGG | (SEQ ID NO: 4691) |
| 208636_at | ACTN1 | FLJ40884 | actinin, alpha | 87 | AACTATTTGCACCGAAATGTCTTGT | (SEQ ID NO: 4692) |
| | | | 1 | | GTCTTGTTTTGTTGCGACATAGGAA | (SEQ ID NO: 4693) |
| | | | | | CAAGCACAAAGTTATATTCCATCCT | (SEQ ID NO: 4694) |
| | | | | | ATATTCCATCCTTTTTACTGATTTT | (SEQ ID NO: 4695) |
| | | | | | CAATCTCATGTCCATTTTGGTGTGG | (SEQ ID NO: 4696) |
| | | | | | CATTTTGGTGTGGGAGTCGGGGTAG | (SEQ ID NO: 4697) |
| | | | | | ATGTGTGTTTGCTAGCTCACTTGTC | (SEQ ID NO: 4698) |
| | | | | | TCTCATTTTTAAATCCCCTCAGAGG | (SEQ ID NO: 4699) |
| | | | | | AAATCCCCTCAGAGGTGTGACTAGT | (SEQ ID NO: 4700) |
| | | | | | GACTAGTCTCTTTATCAGCACACAC | (SEQ ID NO: 4701) |
| | | | | | GGACAACTTTGATATTGCTTGGCAC | (SEQ ID NO: 4702) |
| 208675_s_{—} | DDOST | AGE-R1, | dolichyl- | 1650 | CATCGTGATCCAGCAGCTCTCAAAT | (SEQ ID NO: 4703) |
| at | | KIAA0115, | diphospho- | | CTCAAATGGCAAATGGGTCCCCTTT | (SEQ ID NO: 4704) |
| | | MGC2191, | oligo- | | GGTCCCCTTTGATGGCGATGACATT | (SEQ ID NO: 4705) |
| | | OK/SW-cl.45, | saccharide- | | GGAGTTTGTCCGCATTGATCCTTTT | (SEQ ID NO: 4706) |
| | | OST, OST48, | protein | | GATCCTTTTGTGAGGACCTTCCTGA | (SEQ ID NO: 4707) |
| | | WBP1 | glycosyl- | | ACAGTGTTCAGTTCAAGTTGCCCGA | (SEQ ID NO: 4708) |
| | | | transferase | | GTTGCCCGACGTGTATGGTGTATTC | (SEQ ID NO: 4709) |
| | | | | | GATTACAACCGGCTAGGCTACACAC | (SEQ ID NO: 4710) |
| | | | | | CCTGTACTCTTCCACTCAGGTATCC | (SEQ ID NO: 4711) |
| | | | | | CACACGCAGTATGAGCGCTTCATCC | (SEQ ID NO: 4712) |
| | | | | | ATGGCACAACTTTACCTCTGTGGGA | (SEQ ID NO: 4713) |
| 208829_at | TAPBP | DAMC- | TAP binding | 6892 | TTCTTCAGCCCTAGATGGTGCTCGC | (SEQ ID NO: 4714) |
| | | 227D19.13, | protein | | CCTCTCAATGCTCATCACACACAGG | (SEQ ID NO: 4715) |
| | | NGS17, TAPA, | (tapasin) | | TCACACACAGGGCTATTCCTTTCCT | (SEQ ID NO: 4716) |
| | | TPN, TPSN, | | | TCCTTTCCTCCAATGAACCAAACCG | (SEQ ID NO: 4717) |
| | | tapasin | | | AGACGAGGTCGGCCTCGTCATTCCC | (SEQ ID NO: 4718) |
| | | | | | CTCTTGTGCGGTTCACCACAGTTGT | (SEQ ID NO: 4719) |
| | | | | | TAAGTGATCGTGTGAGTCGTCGTTA | (SEQ ID NO: 4720) |
| | | | | | GAGTCGTCGTTAAATGCCTGTCTCC | (SEQ ID NO: 4721) |
| | | | | | GCATAGGGACCTAAGGCCCACTGGA | (SEQ ID NO: 4722) |
| | | | | | TGGAGGGCGCTCATCAAGTAGCTGC | (SEQ ID NO: 4723) |
| | | | | | GATCTCCGAGTCAGGACGGTCGGCC | (SEQ ID NO: 4724) |
| 209110_s_{—} | RGL2 | DADB- | ral guanine | 5863 | GCCTCAGGAACTCCTCCGAGTGAGG | (SEQ ID NO: 4725) |
| at | | 159G18.6, | nucleotide | | CTCCTTTCCCAGGATCAAGGCCACA | (SEQ ID NO: 4726) |
| | | HKE1.5, | dissociation | | GAAGATTGCACGGGCACTGTTCTGA | (SEQ ID NO: 4727) |
| | | KE1.5, RAB2L | stimulator- | | ACTGTTCTGAGGAGGAAGCCCCGTT | (SEQ ID NO: 4728) |
| | | | like 2 | | AGCCCCGTTGGCTTACAGAAGTCAT | (SEQ ID NO: 4729) |
| | | | | | GTTGGATACCTGTGTATAGCTTCCC | (SEQ ID NO: 4730) |
| | | | | | GATTCTTGGCCATATCCTAACATGC | (SEQ ID NO: 4731) |
| | | | | | CAAAGGCTTCAAGGCTCTGAGCCCC | (SEQ ID NO: 4732) |
| | | | | | AATGTAGGTCCTCGCAGGAGCTCTT | (SEQ ID NO: 4733) |
| | | | | | TTCTTCCCACTCTGGGGGTTTCTAT | (SEQ ID NO: 4734) |
| | | | | | TGGGGGTTTCTATCACTGTGACAAC | (SEQ ID NO: 4735) |
| 209164_s_{—} | CYB561 | FRRS2 | cytochrome | 1534 | TTAAATGAAAAACCGCTGCTGCTGG | (SEQ ID NO: 4736) |
| at | | | b-561 | | CTGTTCTGGAGGACGAGCCTTCTCC | (SEQ ID NO: 4737) |
| | | | | | TTCTGGAGGACGAGCCTTCTCCTTA | (SEQ ID NO: 4738) |
| | | | | | CTGCCCATCTTTCCAGGAAGTCAGG | (SEQ ID NO: 4739) |
| | | | | | CTCCAGCCCCATAAAGAGTGTCATG | (SEQ ID NO: 4740) |
| | | | | | AGAGTGTCATGTTAGCTGAGTCACC | (SEQ ID NO: 4741) |
| | | | | | GTGTCATGTTAGCTGAGTCACCATT | (SEQ ID NO: 4742) |
| | | | | | TAGCTGAGTCACCATTTGGCTTCGG | (SEQ ID NO: 4743) |
| | | | | | TCACCATTTGGCTTCGGCCTGGAAA | (SEQ ID NO: 4744) |
| | | | | | CATTTGGCTTCGGCCTGGAAATAGT | (SEQ ID NO: 4745) |
| | | | | | GAACACTGATCGTGTGCGAGGCCAG | (SEQ ID NO: 4746) |
| 209228_x_{—} | TUSC3 | D8S1992, | tumor | 7991 | ACCCAACTACTCTGGTACCATTGCT | (SEQ ID NO: 4747) |
| at | | M33, | suppressor | | AGACTGGTTGGGCCATGGTGTCTCT | (SEQ ID NO: 4748) |
| | | MGC13453, | candidate 3 | | GGTGTCTCTGTGTATAGTCTTTGCT | (SEQ ID NO: 4749) |
| | | MRT7, N33, | | | CTTTGCTATGACTTCTGGCCAGATG | (SEQ ID NO: 4750) |
| | | OST3A | | | ATGTGGAACCATATCCGTGGACCTC | (SEQ ID NO: 4751) |
| | | | | | GGAGCAGCCAGGCTCAGTTTGTGGC | (SEQ ID NO: 4752) |
| | | | | | TCTGGTACTGAATGCCGCTATCACC | (SEQ ID NO: 4753) |
| | | | | | CCTAGTGGGATTGGGCCTGGTGGTC | (SEQ ID NO: 4754) |
| | | | | | CTTCTTCTTCAGTTTTCTACTTTCA | (SEQ ID NO: 4755) |
| | | | | | CCAAGTACCACGGCTATCCTTATAG | (SEQ ID NO: 4756) |
| | | | | | AACTCTATAACCTCAGCCTTTTAAT | (SEQ ID NO: 4757) |
| 209285_s_{—} | C3orf63 | DKFZp686C2456, | chromosome | 23272 | GAGGGTATTGGTACATGACGACATG | (SEQ ID NO: 4758) |
| at | | KIAA1105, | 3 open | | TTTAAACACAGCTTACTCTTCCTCA | (SEQ ID NO: 4759) |
| | | RAP140, se89-1 | reading | | ATCAAAACTAACTACAGCCATTCTT | (SEQ ID NO: 4760) |
| | | | frame 63 | | CATTCTTTTTAAAGCCCAAGGGATG | (SEQ ID NO: 4761) |
| | | | | | GGTGTAAGGATGTTACCTGTTTGTT | (SEQ ID NO: 4762) |
| | | | | | GTAGTATGGTGAGTAAGGTTATGCG | (SEQ ID NO: 4763) |
| | | | | | TTCTAACAAACACTGCCAACACGTC | (SEQ ID NO: 4764) |
| | | | | | AACACTGCCAACACGTCAATTTTTT | (SEQ ID NO: 4765) |
| | | | | | AAGCGTGGGCCACATTGCTAAGAAT | (SEQ ID NO: 4766) |
| | | | | | GCCTTATTGATGTTTTGCCGTTCCA | (SEQ ID NO: 4767) |
| | | | | | GTTTTGCCGTTCCAATGTATGCATT | (SEQ ID NO: 4768) |
| 209409_at | GRB10 | GRB-IR, Grb- | growth factor | 2887 | TGTATCTCTGCCTGTGATTTTCTTT | (SEQ ID NO: 4769) |
| | | 10, IRBP, | receptor- | | GAAACTCCATGTAGCAACCAGGACG | (SEQ ID NO: 4770) |
| | | KIAA0207, | bound | | TGTGCCTCAGCCTAGATGTTTTGTC | (SEQ ID NO: 4771) |
| | | MEG1, RSS | protein 10 | | TTCTCTTTTCTGCACTTAATACCTG | (SEQ ID NO: 4772) |
| | | | | | TGACAGTATGACCGATCTCTGCGCC | (SEQ ID NO: 4773) |
| | | | | | CGCCTTTCTGGGGGCGGGCAAGCTG | (SEQ ID NO: 4774) |
| | | | | | GCTGGCGGTAGATTTGTGATGTCAC | (SEQ ID NO: 4775) |
| | | | | | AACCTTTATTCCATGTGCTTTGCTT | (SEQ ID NO: 4776) |
| | | | | | CTTCATTCTGTACATAGCTCTTTGG | (SEQ ID NO: 4777) |
| | | | | | AGCTCTTTGGCTCGTGAACCTAATT | (SEQ ID NO: 4778) |
| | | | | | AGGGACTGATGTTCTGTTTCTTGTA | (SEQ ID NO: 4779) |
| 209506_s_{—} | NR2F1 | COUP-TFI, | nuclear | 7025 | CATCGTGCTGTTCACGTCAGACGCC | (SEQ ID NO: 4780) |
| at | | EAR-3, EAR3, | receptor | | GCAGTGCGCACTGGAGGAGTACGTG | (SEQ ID NO: 4781) |
| | | ERBAL3, | subfamily 2, | | AGCCGTTTTGGCAAACTGCTGCTGC | (SEQ ID NO: 4782) |
| | | NR2F2, | group F, | | GAAACTCTCATCCGCGATATGTTAC | (SEQ ID NO: 4783) |
| | | SVP44, | member1 | | TGTCTGGGAGCAGCTTCAACTGGCC | (SEQ ID NO: 4784) |
| | | TCFCOUP1, | | | CAACTGGCCTTACATGTCCATCCAG | (SEQ ID NO: 4785) |
| | | TFCOUP1 | | | CTAGAGACTCAGAGGACCCACCTGG | (SEQ ID NO: 4786) |
| | | | | | CGCGGGGACACCGGGAAGTGCAGCG | (SEQ ID NO: 4787) |
| | | | | | GAGGGCCGAGACAGGAGCAGCCCAC | (SEQ ID NO: 4788) |
| | | | | | GCCCACCCAGCAGAAATACAATCCG | (SEQ ID NO: 4789) |
| | | | | | GGATCAGATCTGTGAGCACGTTGGC | (SEQ ID NO: 4790) |
| 209592_s_{—} | WDR68 | AN11; HAN11 | WD repeat | 10238 | GATGGCTCGGTGCGGATGTTTGACC | (SEQ ID NO: 4791) |
| at | | | domain 68 | | ACAGCACCATCATTTACGAAGACCC | (SEQ ID NO: 4792) |
| | | | | | CATTTACGAAGACCCACAGCATCAC | (SEQ ID NO: 4793) |
| | | | | | TGCTTCGCCTCTGCTGGAACAAGCA | (SEQ ID NO: 4794) |
| | | | | | GAGATCAACAATGTGCAGTGGGCAT | (SEQ ID NO: 4795) |
| | | | | | CAGTGGGCATCAACTCAGCCCGACT | (SEQ ID NO: 4796) |
| | | | | | CCATCTGCTACAACAACTGCCTGGA | (SEQ ID NO: 4797) |
| | | | | | CTGCCTGGAGATACTCAGAGTGTAG | (SEQ ID NO: 4798) |
| | | | | | AGAGTGTAGTGTTGGTGGCGCTGTG | (SEQ ID NO: 4799) |
| | | | | | TGTGCCCACGAGGCAGGGGCTTTTG | (SEQ ID NO: 4800) |
| | | | | | GCAGGGGCTTTTGTATTTCCTGCCT | (SEQ ID NO: 4801) |
| 209774_x_{—} | CXCL2 | CINC-2a, | chemokine | 2920 | AGAGAGACACAGCTGCAGAGGCCAC | (SEQ ID NO: 4802) |
| at | | GROb, Gro2, | (C-X-C motif) | | ACCTGGATTGCGCCTAATGTGTTTG | (SEQ ID NO: 4803) |
| | | MIP-2, MIP-2a, | ligand 2 | | TGATTGAATCTACTTGCACACTCTC | (SEQ ID NO: 4804) |
| | | Mgsa-b, Mip2, | | | GCACACTCTCCCATTATATTTATTG | (SEQ ID NO: 4805) |
| | | Scyb, Scyb2 | | | AACCCAAGTTAGTTCAATCCTGATT | (SEQ ID NO: 4806) |
| | | | | | GAAGGTTTGCAGATATTCTCTAGTC | (SEQ ID NO: 4807) |
| | | | | | GACATATCACATGTCAGCCACTGTG | (SEQ ID NO: 4808) |
| | | | | | ATGGCCAGTAAGATCAATGTGACGG | (SEQ ID NO: 4809) |
| | | | | | TGTGACGGCAGGGAAATGTATGTGT | (SEQ ID NO: 4810) |
| | | | | | CAGTGTGTGGTCAACATTTCTCATG | (SEQ ID NO: 4811) |
| | | | | | ATGTTAATTATGCAGTGTTTCCCTC | (SEQ ID NO: 4812) |
| 209796_s_{—} | CNPY2 | MGC156825, | canopy 2 | 10330 | TGGAGCGACCCCATTACGCTAAAGA | (SEQ ID NO: 4813) |
| at | | Tmem4 | homolog | | GAGCGACCCCATTACGCTAAAGATG | (SEQ ID NO: 4814) |
| | | | (zebrafish) | | GACCCCATTACGCTAAAGATGAAAG | (SEQ ID NO: 4815) |
| | | | | | GAGCCAGGATCTCCACTGTGGAGCA | (SEQ ID NO: 4816) |
| | | | | | GAATGGGAAATTGCCCAGGTGGACC | (SEQ ID NO: 4817) |
| | | | | | ACCCCAAGAAGACCATTCAGATGGG | (SEQ ID NO: 4818) |
| | | | | | GACCATTCAGATGGGATCTTTCCGG | (SEQ ID NO: 4819) |
| | | | | | GATGGGATCTTTCCGGATCAATCCA | (SEQ ID NO: 4820) |
| | | | | | GGATCTTTCCGGATCAATCCAGATG | (SEQ ID NO: 4821) |
| | | | | | TTTCCGGATCAATCCAGATGGCAGC | (SEQ ID NO: 4822) |
| | | | | | TCCAGATGGCAGCCAGTCAGTGGTG | (SEQ ID NO: 4823) |
| 209970_x_{—} | CASP1 | ICE, IL1BC, | caspase 1, | 834 | CGAAGGTGATCATCATCCAGGCCTG | (SEQ ID NO: 4824) |
| at | | P45 | apoptosis- | | ACAGCCCTGGTGTGGTGTGGTTTAA | (SEQ ID NO: 4825) |
| | | | related | | GGAAACCTATCTTTACCAACTACAG | (SEQ ID NO: 4826) |
| | | | cysteine | | GAAGGATTTTATCGCTTTCTGCTCT | (SEQ ID NO: 4827) |
| | | | peptidase | | TTTCTGCTCTTCCACACCAGATAAT | (SEQ ID NO: 4828) |
| | | | (interleukin | | GAGACATCCCACAATGGGCTCTGTT | (SEQ ID NO: 4829) |
| | | | 1, beta, | | GAATATGCCTGTTCCTGTGATGTGG | (SEQ ID NO: 4830) |
| | | | convertase) | | TTTCCGCAAGGTTCGATTTTCATTT | (SEQ ID NO: 4831) |
| | | | | | GATGGTAGAGCGCAGATGCCCACCA | (SEQ ID NO: 4832) |
| | | | | | TGACAAGATGTTTCTACCTCTTCCC | (SEQ ID NO: 4833) |
| | | | | | TTCTACCTCTTCCCAGGACATTAAA | (SEQ ID NO: 4834) |
| 210029_at | INDO | CD107B, IDO, | idoleamine- | 3620 | ACCCCCAGCTATCAGACGGTCTGGT | (SEQ ID NO: 4835) |
| | | IDO1 | pyrrole 2,3 | | AGGCCAAAGCAGCGTCTTTCAGTGC | (SEQ ID NO: 4836) |
| | | | diosygenase | | GCTGGTGGAGGACATGCTGCTCAGT | (SEQ ID NO: 4837) |
| | | | | | TGCTCAGTTCCTCCAGGACATGAGA | (SEQ ID NO: 4838) |
| | | | | | GGAACTTCCTGTGCTCATTAGAGTC | (SEQ ID NO: 4839 |
| | | | | | ATTAGAGTCAAATCCCTCAGTCCGT | (SEQ ID NO: 4830) |
| | | | | | ATGACGCCTGTGTGAAAGCTCTGGT | (SEQ ID NO: 4831) |
| | | | | | TGGTCTCCCTGAGGAGCTACCATCT | (SEQ ID NO: 4832) |
| | | | | | GAGCTACCATCTGCAAATCGTGACT | (SEQ ID NO: 4833) |
| | | | | | CATCCTGATTCCTGCAAGCCAGCAG | (SEQ ID NO: 4834) |
| | | | | | GAATAAGACCTCTGAAGACCCTTCA | (SEQ ID NO: 4835) |
| 210976_s_{—} | PFKM | GSD7, | phospho- | 5213 | GCGTAAGAGGGCTCTGGTCTTCCAA | (SEQ ID NO: 4836) |
| at | | MGC8699, | fructokinase, | | TTTGAGCATCGAATCCCCAAGGAAC | (SEQ ID NO: 4837) |
| | | PFK-1, PFK-M, | muscle | | AACTGAGGCCCATCCTCAAAATCCT | (SEQ ID NO: 4838) |
| | | PFKX | | | TGACTTGGACACTTCAGACCATGCC | (SEQ ID NO: 4839) |
| | | | | | TGCCGTCTAAACCTCTCTGGAGTGA | (SEQ ID NO: 4840) |
| | | | | | AGCTCACACCCTAATAAGTCCACAT | (SEQ ID NO: 4841) |
| | | | | | AAGTCCACATCTTCTCAGTGTTTTA | (SEQ ID NO: 4842) |
| | | | | | TATTCTGTACCTTGCAGCCATGACC | (SEQ ID NO: 4843) |
| | | | | | CCCAGCTTTATCTGTCACACAAGGC | (SEQ ID NO: 4844) |
| | | | | | GCTACTGCTAGATATCACTTACTCA | (SEQ ID NO: 4845) |
| | | | | | AAGAGTCTTGGTTCCTCTACTACTT | (SEQ ID NO: 4846) |
| 211122_s_{—} | CXCL11 | H174, I-TAC, | chemokine | 6373 | GAGACTTTTCTATGGTTTTGTGACT | (SEQ ID NO: 4847) |
| at | | IP-9, IP9, | (C-X-C motif) | | GTGACTTTCAACTTTTGTACAGTTA | (SEQ ID NO: 4848) |
| | | MGC102770, | ligand 11 | | GACAATCAGAATTCCACTGCCCAAA | (SEQ ID NO: 4849) |
| | | SCYB11, | | | GGCTGGTTACCATCGGAGTTTACAA | (SEQ ID NO: 4850) |
| | | SCYB9B, b-R1 | | | TGCTTTCACGTTCTTACTTGTTGTA | (SEQ ID NO: 4851) |
| | | | | | TACATTCATGCATTTCTAGGCTAGA | (SEQ ID NO: 4852) |
| | | | | | AGAGAACCTTCTAGATTTGATGCTT | (SEQ ID NO: 4853) |
| | | | | | GTCTCTAGAAGTTATCTGTCTGTAT | (SEQ ID NO: 4854) |
| | | | | | CTGTCTGTATTGATCTTTATGCTAT | (SEQ ID NO: 4855) |
| | | | | | GCTATATTACTATCTGTGGTTACAG | (SEQ ID NO: 4856) |
| | | | | | TACTGGAGTCAAGCCCTTATAAGTC | (SEQ ID NO: 4857) |
| 211340_s_{—} | MCAM | CD146, | melanoma | 4162 | GCCCTCTTGATGGATCACGTAAAAC | (SEQ ID NO: 4858) |
| at | | MUC18 | cell adhesion | | AAGGCAGCGGGGAGCAGACAAAGAT | (SEQ ID NO: 4859) |
| | | | molecule | | AGATGAGGTCTACACTGTCCTTCAT | (SEQ ID NO: 4860) |
| | | | | | GTCTACACTGTCCTTCATGGGGATT | (SEQ ID NO: 4861) |
| | | | | | ACTGTCCTTCATGGGGATTAAAGCT | (SEQ ID NO: 4862) |
| | | | | | GCTATGGTTATATTAGCACCAAACT | (SEQ ID NO: 4863) |
| | | | | | ACCCTAGAAGGGCCCAAATGAGAGA | (SEQ ID NO: 4864) |
| | | | | | ATGAGAGAATGGTACTTAGGGATGG | (SEQ ID NO: 4865) |
| | | | | | GTGTATATATGGTTTTGTCAGGTGT | (SEQ ID NO: 4866) |
| | | | | | GGTTTTGTCAGGTGTGTAAATTTGC | (SEQ ID NO: 4867) |
| | | | | | AATTGTTTCCTTTATATATGTATGT | (SEQ ID NO: 4868) |
| 211370_s_{—} | MAP2K5 | AI324775, | mitogen- | 5607 | CATTCTGATGTCTGGAGCTTAGGAA | (SEQ ID NO: 4869) |
| at | | AI428457, | activated | | CTCCAGCTTCTGCAGTGCATTGTTG | (SEQ ID NO: 4870) |
| | | MEK5, | protein | | TTGTTGATGAGGATTCGCCCGTCCT | (SEQ ID NO: 4871) |
| | | Mapkk5, | kinase kinase | | CCCGTCCTTCCAGTTGGAGAGTTCT | (SEQ ID NO: 4872) |
| | | Prkmk5 | 5 | | GGAGAGTTCTCGGAGCCATTTGTAC | (SEQ ID NO: 4873) |
| | | | | | GGAGCCATTTGTACATTTCATCACT | (SEQ ID NO: 4874) |
| | | | | | ACATTTCATCACTCAGTGTATGCGA | (SEQ ID NO: 4875) |
| | | | | | GCCAAAAGAAAGGCCAGCACCTGAA | (SEQ ID NO: 4876) |
| | | | | | GCACCTGAAGAATTGATGGGCCACC | (SEQ ID NO: 4877) |
| | | | | | AAGAATTGATGGGCCACCCGTTCAT | (SEQ ID NO: 4878) |
| | | | | | ATGATGGAAATGCCGCCGTGGTGTC | (SEQ ID NO: 4879) |
| 211595_s_{—} | MRPS11 | FLJ22512, | mitochondrial | 64963 | ACACAGATCCAGGTAGTCTCTGCTA | (SEQ ID NO: 4880) |
| at | | FLJ23406, | ribosomal | | GTCTCTGCTAGTAATGAGCCCCTTG | (SEQ ID NO: 4881) |
| | | HCC-2 | protein S11 | | AGCACAGACAGCAGGCATAGCCGCA | (SEQ ID NO: 4882) |
| | | | | | AGCCGCAGCGGCGAGAGCTAAACAA | (SEQ ID NO: 4883) |
| | | | | | CAAAAGGGCGTGATCCACATCCGAG | (SEQ ID NO: 4884) |
| | | | | | TTGTCTGCCATGCACGGACTGATCA | (SEQ ID NO: 4885) |
| | | | | | GGACTGATCATGGGCGGCCTGGAAG | (SEQ ID NO: 4886) |
| | | | | | CTCAGCTCCAGTGGGACCTTGTAAA | (SEQ ID NO: 4887) |
| | | | | | GGACCTTGTAAAATGCTCCCTGTCA | (SEQ ID NO: 4888) |
| | | | | | TCCCTGTCAGAGCTCTCCAGAATAT | (SEQ ID NO: 4889) |
| | | | | | GGTGTGCCCCAGAAGTAAGCTTTGC | (SEQ ID NO: 4890) |
| 211951_at | NOLC1 | KIAA0035, | nucleolar and | 9221 | ATTGTGTCTCCTAGTTGGTACCTGG | (SEQ ID NO: 4891) |
| | | NOPP130, | coiled-body | | CCTGGGAGCAATTGACATGCCCCCT | (SEQ ID NO: 4892) |
| | | NOPP140, | phospho- | | AGCTGGCCTGACGGTATGGCTGCAG | (SEQ ID NO: 4893) |
| | | NS5ATP13, | protein | | TGAGCAGTAGCGGTACTCAGCCAGA | (SEQ ID NO: 4894) |
| | | P130 | 1 | | GAGGGAAGAGTCCACAGCTTTCTGG | (SEQ ID NO: 4895) |
| | | | | | GTGGTAGAAAAGTGTGCCCCAAGCC | (SEQ ID NO: 4896) |
| | | | | | CCCCAAGCCTTCATGGACGAGTTAT | (SEQ ID NO: 4897) |
| | | | | | TAGTCTCCTCTTGTTTGGATTCCAT | (SEQ ID NO: 4898) |
| | | | | | GGATTCCATACTTGCTAAATAACCT | (SEQ ID NO: 4899) |
| | | | | | AACCTGGTTTTCCATGTAACTGCCT | (SEQ ID NO: 4900) |
| | | | | | GAAAATGTACTGTTCATGCTGACAC | (SEQ ID NO: 4901) |
| 212463_at | CD59 | 16.3A5, 1F5, | CD59 | 966 | GATGCTGGTGTTGGTGTGACATAAT | (SEQ ID NO: 4902) |
| | | EJ16, EJ30, | molecule, | | ATAATGCTATGGCCAGAACTGAAAC | (SEQ ID NO: 4903) |
| | | EL32, | complement | | GGCTCCCACAGTTAGAAGGCGAAGT | (SEQ ID NO: 4904) |
| | | FLJ38134, | regulatory | | GGCGAAGTCGCACAATAGGCCGTCT | (SEQ ID NO: 4905) |
| | | FLJ92039, | protein | | GCCGTCTGCAAGCTGGGTTAGAGAG | (SEQ ID NO: 4906) |
| | | G344, HRF-20, | | | AGCCAGTAGTGGCTCAGCCTGAGTT | (SEQ ID NO: 4907) |
| | | HRF20, MAC- | | | AACCCACTGGTGCAAGTCCTAGATT | (SEQ ID NO: 4908) |
| | | IP, MACIF, | | | GAAGAACCTGGAGTCTGATGTCCAA | (SEQ ID NO: 4909) |
| | | MEM43, | | | TACCAAAGAGGCTACCGATTCCTTC | (SEQ ID NO: 4910) |
| | | MGC2354, | | | TCTGCACCTTCTAAACCTAGTTCTT | (SEQ ID NO: 4911) |
| | | MIC11, MIN1, | | | GCTTTCCATTACATGAGCTGTCTCA | (SEQ ID NO: 4912) |
| | | MIN2, MIN3, | | | | |
| | | MIRL, MSK21, | | | | |
| | | p18-20 | | | | |
| 212765_at | CAMSAP1L1 | RP11- | calmodulin | 23271 | GAGTTCATTGCTCTCAGTATAAGAT | (SEQ ID NO: 4913) |
| | | 93N17.1, | regulated | | AAGTCTGAGGATTTTCGTCAACCTT | (SEQ ID NO: 4914) |
| | | KIAA1078, | spectrin- | | CGTCAACCTTACTGAAACACACTGG | (SEQ ID NO: 4915) |
| | | MGC150680, | associated | | AACACACTGGTGCTTTCATCATCAG | (SEQ ID NO: 4916) |
| | | MGC150681 | protein 1- | | TTGTCGTGGTTACCAGTGCAGCCTG | (SEQ ID NO: 4917) |
| | | | like 1 | | AAATTCTGCTATTTGACACAGCTTT | (SEQ ID NO: 4918) |
| | | | | | ATGGTTTCATGGACACTGTTGAGCA | (SEQ ID NO: 4919) |
| | | | | | AGTGTATGGTGTGCTTACCTGTCCA | (SEQ ID NO: 4920) |
| | | | | | TACCTGTCCACTCTAGAGCATTGCT | (SEQ ID NO: 4921) |
| | | | | | GAGCATTGCTTACAGGIIIiiiGTT | (SEQ ID NO: 4922) |
| | | | | | TGCTATTTCCTGGTACAGTGTAGTT | (SEQ ID NO: 4923) |
| 213307_at | SHANK2 | CORTBP1, | SH3 and | 22941 | AAAAATTCCAGTCCTCATATCTTTT | (SEQ ID NO: 4924) |
| | | CTTNBP1, | multiple | | CTAGACTTTGCTTCCAATGGTTTCT | (SEQ ID NO: 4925) |
| | | ProSAP1, | ankyrin | | TTCCAGACCACTTTTCCTAGATGAA | (SEQ ID NO: 4926) |
| | | SHANK, | repeat | | GCTGCATGCAGACAGGACTGCCCGT | (SEQ ID NO: 4927) |
| | | SPANK-3 | domains 2 | | GACTGCCCGTGCTTTGTGGGGAATC | (SEQ ID NO: 4928) |
| | | | | | TTCCGCAGATCTCATCACTTTGATT | (SEQ ID NO: 4929) |
| | | | | | GTTTATCGTTCCTGTAACTTGTTCT | (SEQ ID NO: 4930) |
| | | | | | AACTTGTTCTACATTCCACAGTCTT | (SEQ ID NO: 4931) |
| | | | | | ATTCCACAGTCTTTACCGTTTTATG | (SEQ ID NO: 4932) |
| | | | | | CAACAATCCCTGTCCATTGATTCCA | (SEQ ID NO: 4933) |
| | | | | | GAACTCTTTGTTCATGCCAATTTTG | (SEQ ID NO: 4934) |
| 213656_s_{—} | KLC1 | KLC, KNS2, | kinesin light | 3831 | CAGCAGCAGTGGCCTGGAAGACGCC | (SEQ ID NO: 4935) |
| at | | KNS2A, | chain 1 | | GCAGTGGCCTGGAAGACGCCACCGC | (SEQ ID NO: 4936) |
| | | MGC15245 | | | TTCTCCTGCGTCTGTGTGCATAGGA | (SEQ ID NO: 4937) |
| | | | | | CCTGCGTCTGTGTGCATAGGACATG | (SEQ ID NO: 4938) |
| | | | | | GTCTGTGTGCATAGGACATGATACT | (SEQ ID NO: 4939) |
| | | | | | GACATGATACTAATAACCACACGGC | (SEQ ID NO: 4940) |
| | | | | | AATAACCACACGGCTGGCGTGACCT | (SEQ ID NO: 4941) |
| | | | | | CCATGTGTAACTTCCTCACGTTGTG | (SEQ ID NO: 4942) |
| | | | | | TGTAACTTCCTCACGTTGTGTGCGA | (SEQ ID NO: 4943) |
| | | | | | ACTTCCTCACGTTGTGTGCGATAAC | (SEQ ID NO: 4944) |
| | | | | | GTGTGCGATAACGTATTTTATTGTA | (SEQ ID NO: 4945) |
| 213895_at | EMP1 | CL-20, EMP-1, | epithelial | 2012 | AAGGACTGGTATCTTTCTGTGAGCA | (SEQ ID NO: 4946) |
| | | TMP | membrane | | GATAAAGACTGCATATCCTTGTGTC | (SEQ ID NO: 4947) |
| | | | protein 1 | | ATTGCATTGATTCTTGATGCTTTCT | (SEQ ID NO: 4948) |
| | | | | | GATGCTTTCTTAGAGGCCTACATGA | (SEQ ID NO: 4949) |
| | | | | | GATTTCTTAGATTGCTCTGATAAAC | (SEQ ID NO: 4950) |
| | | | | | AGAGGGAACTTTTGTCAGACTCTGC | (SEQ ID NO: 4951) |
| | | | | | CAGACTCTGCAACAAACTCCTAGCT | (SEQ ID NO: 4952) |
| | | | | | AACTCCTAGCTCTATCCAGAGTGTC | (SEQ ID NO: 4953) |
| | | | | | TCCAGAGTGTCCTCTGCTGCTAAGA | (SEQ ID NO: 4954) |
| | | | | | GTATCTTTCTCCTCAAAAGCCTGGA | (SEQ ID NO: 4955) |
| | | | | | CACCCCAGTCCAGCCATGAGGGTAT | (SEQ ID NO: 4956) |
| 213925_at | C1orf95 | RP11-9C4.1, | Chromosome | 375057 | ATGAGGGTATTTCCAGCCTATTCCA | (SEQ ID NO: 4957) |
| | | DKFZp761P211 | 1 open | | ATTTCCAGCCTATTCCAATGACTGA | (SEQ ID NO: 4958) |
| | | | reading | | CAATGACTGAAACCCTTCTTGGAAG | (SEQ ID NO: 4959) |
| | | | frame 95 | | TAATGTCGGGGACGTAGGGACGCTT | (SEQ ID NO: 4960) |
| | | | | | CTAGGGGCCAAGCAGGGTTCCAGAT | (SEQ ID NO: 4961) |
| | | | | | AGCCTTCTGCCAGCTTTAAAACCCT | (SEQ ID NO: 4962) |
| | | | | | AAAACCCTTCACTCAAGCAGCATTA | (SEQ ID NO: 4964) |
| | | | | | AGCAGCATTACTGTACATGCAATGA | (SEQ ID NO: 4965) |
| | | | | | CATACACACACCTTCCTATTATAAA | (SEQ ID NO: 4966) |
| | | | | | AAGCATGACATCTCTTTGGCATTCC | (SEQ ID NO: 4967) |
| 214106_s_{—} | GMDS | RP1- | GDP- | 2762 | CAGAAGCTGAACTGGAAGCCCCGGG | (SEQ ID NO: 4968) |
| at | | 118B18.1, | mannose | | GGTCGCTTTCGATGAGCTGGTGAGG | (SEQ ID NO: 4969) |
| | | GMD | 4,6- | | GTGGAGCTCATGAGGACAAACCCCA | (SEQ ID NO: 4970) |
| | | | dehydratase | | TGCAGACGCGCTGCGGGGATGGGGA | (SEQ ID NO: 4971) |
| | | | | | CCGCCGAGGTTTGTAGCAGCCGGGA | (SEQ ID NO: 4972) |
| | | | | | TTGTAGCAGCCGGGATGTGACCCTC | (SEQ ID NO: 4973) |
| | | | | | TTTGGGTCGCTTTGCGTTTGTCGAA | (SEQ ID NO: 4974) |
| | | | | | TTTGTCGAAGCCTCCTCTGAATGGC | (SEQ ID NO: 4975) |
| | | | | | GTCGAAGCCTCCTCTGAATGGCTTT | (SEQ ID NO: 4976) |
| | | | | | AATCACATTCACTTTACTTGAAATT | (SEQ ID NO: 4977) |
| | | | | | CAAATTGTGGGGCCTTCAAATTGTT | (SEQ ID NO: 4978) |
| 214167_s_{—} | RPLP0/// | L10E, | ribosomal | 220717 | CCATTGCCCCATGTGAAGTCACTGT | (SEQ ID NO: 4979) |
| at | RPLP0-like | MGC111226, | protein | 6175 | CCCCATGTGAAGTCACTGTGCCAGC | (SEQ ID NO: 4980) |
| | | MGC88175, | large, P0/// | | CCAGCCCAGAACACTGGTCTCGGGC | (SEQ ID NO: 4981) |
| | | P0, PRLP0, | ribosomal | | AGCCCAGAACACTGGTCTCGGGCCC | (SEQ ID NO: 4982) |
| | | RPP0/// | protein P0- | | GAACACTGGTCTCGGGCCCGAGAAG | (SEQ ID NO: 4983) |
| | | | like | | TGGTCTCGGGCCCGAGAAGACCTCC | (SEQ ID NO: 4984) |
| | | | | | TTTTTCCAGGCTTTAGGTATCACCA | (SEQ ID NO: 4985) |
| | | | | | GGTATCACCACTAAAATCTCCAGGG | (SEQ ID NO: 4986) |
| | | | | | CACCACTAAAATCTCCAGGGGCACC | (SEQ ID NO: 4987) |
| | | | | | TAAAATCTCCAGGGGCACCATTGAA | (SEQ ID NO: 4988) |
| | | | | | ATCTCCAGGGGCACCATTGAAATCC | (SEQ ID NO: 4989) |
| 214175_x_{—} | PDLIM4 | RIL | PDZ and LIM | 8572 | CTACTACTATACGGCTGCGAGAAGA | (SEQ ID NO: 4990) |
| at | | | domain 4 | | ATACGGCTGCGAGAAGACGACAGAA | (SEQ ID NO: 4991) |
| | | | | | GACGACAGAAGGGCTACGACGTGGT | (SEQ ID NO: 4992) |
| | | | | | AGAAGGGCTACGACGTGGTGGCGGT | (SEQ ID NO: 4993) |
| | | | | | GGTGTACCCCAATGCCAAGGTGGAA | (SEQ ID NO: 4994) |
| | | | | | GTACCCCAATGCCAAGGTGGAACTC | (SEQ ID NO: 4995) |
| | | | | | ATGCCAAGGTGGAACTCGTCTGAGC | (SEQ ID NO: 4996) |
| | | | | | AGGTGGAACTCGTCTGAGCTGGGAC | (SEQ ID NO: 4997) |
| | | | | | CCCTGCTCGGCCGGTGTAAATATGT | (SEQ ID NO: 4998) |
| | | | | | TGCTCGGCCGGTGTAAATATGTTTC | (SEQ ID NO: 4999) |
| | | | | | GTGTAAATATGTTTCACCCTGTCCC | (SEQ ID NO: 5000) |
| 214620_x_{—} | PAM | PAL, PHM | peptidyl- | 5066 | CTCCTCCTGAAAACCAAGCTTTGAT | (SEQ ID NO: 5001) |
| at | | | glycine | | CAGAATGTCAGATTCCTTTCCCTTT | (SEQ ID NO: 5002) |
| | | | alpha- | | GACTGTACACACTTTATTTACTTCG | (SEQ ID NO: 5003) |
| | | | amidating | | AGTTCATAACAGTGCCATTGTCTTT | (SEQ ID NO: 5004) |
| | | | monooxygenase | | TAGACTAGAGAAACCGTCCTCTTTT | (SEQ ID NO: 5005) |
| | | | | | TCCTCTTTTTCCATCATAATTCTAA | (SEQ ID NO: 5006) |
| | | | | | GATTTGCCCATTTACACTTTTGAGA | (SEQ ID NO: 5007) |
| | | | | | GTGTTTTCAGAGCATTAGCTGTCAG | (SEQ ID NO: 5008) |
| | | | | | TAGCTGTCAGTGTATTTTCCAGTTT | (SEQ ID NO: 5009) |
| | | | | | TTCCAGTTTTGGGTATTGCAGATTT | (SEQ ID NO: 5010) |
| | | | | | TGCAGATTTTACATACAACTTTTAT | (SEQ ID NO: 5011) |
| 215034_s_{—} | TM4SF1 | H-L6, L6, | transmembrane | 4071 | TATGACTGCTAAAAGAACCAACCCA | (SEQ ID NO: 5012) |
| at | | M3S1, TAAL6 | 4 L six | | AAAGAACCAACCCAGGACAGAGCCA | (SEQ ID NO: 5013) |
| | | | family | | ACCCAGGACAGAGCCACAATCTTCC | (SEQ ID NO: 5014) |
| | | | member 1 | | CAGGACAGAGCCACAATCTTCCTCT | (SEQ ID NO: 5015) |
| | | | | | ACAGAGCCACAATCTTCCTCTATTT | (SEQ ID NO: 5016) |
| | | | | | TTTCACTTGTATTCATTTGTAAAAC | (SEQ ID NO: 5017) |
| | | | | | TTTGTATTAGTGTAACATACTCCCC | (SEQ ID NO: 5018) |
| | | | | | AAACGCCTGTAAAGACTGGCATCTT | (SEQ ID NO: 5019) |
| | | | | | GCCTGTAAAGACTGGCATCTTCACA | (SEQ ID NO: 5020) |
| | | | | | GACTGGCATCTTCACAGGATGTCAG | (SEQ ID NO: 5021) |
| | | | | | ATCTTCACAGGATGTCAGTGTTTAA | (SEQ ID NO: 5022) |
| 215440_s_{—} | BEX4 | RP4- | BEX family | 56271 | GACAACCATTATGACTTTTGCCTCA | (SEQ ID NO: 5023) |
| at | | 635G19.2, | member 4 | | TTGCCTCATACCTTGAATCCTAAAA | (SEQ ID NO: 5024) |
| | | BEXL1, | | | AAAGTTTTCGCTGAGGTTAATGTGA | (SEQ ID NO: 5025) |
| | | FLJ10097 | | | GTGAACACTGCTTTACAAGCTTGTA | (SEQ ID NO: 5026) |
| | | | | | GTGATTTACTTTTTCTGTAAGCCTT | (SEQ ID NO: 5027) |
| | | | | | GTTTACACTTACCAGTTTCTAATGG | (SEQ ID NO: 5028) |
| | | | | | GTCTCAGCCTAAAAGTTACGGTCAG | (SEQ ID NO: 5029) |
| | | | | | TACGGTCAGCATGGCAATTCACCTA | (SEQ ID NO: 5030) |
| | | | | | CTGGACTCAAAATCTCAGTTGTCTT | (SEQ ID NO: 5031) |
| | | | | | TGTAGGACCTATCGTCCAGACTCAC | (SEQ ID NO: 5032) |
| | | | | | CGTCCAGACTCACAGAGTGGGGCTC | (SEQ ID NO: 5033) |
| 216220_s_{—} | ADORA1 | RDC7 | adenosine | 134 | GACCAGGTGTCTAGAGGCAACAGTG | (SEQ ID NO: 5034) |
| at | | | A1 receptor | | TAGAGGCAACAGTGTTCTGAGCCCC | (SEQ ID NO: 5035) |
| | | | | | GGCTGGGAGAAGGTGCTTGGGCTTC | (SEQ ID NO: 5036) |
| | | | | | TGCTTGGGCTTCTGCGGTGAGGCAG | (SEQ ID NO: 5037) |
| | | | | | GGGCTTCTGCGGTGAGGCAGGGGAG | (SEQ ID NO: 5038) |
| | | | | | GAGGCAGGGGAGTCTGCTTGTCTTA | (SEQ ID NO: 5039) |
| | | | | | GGGGAGTCTGCTTGTCTTAGATGTT | (SEQ ID NO: 5040) |
| | | | | | GTCTTAGATGTTGGTGGTGCAGCCC | (SEQ ID NO: 5041) |
| | | | | | CAGCCCCAGGACCAAGCTTAAGGAG | (SEQ ID NO: 5042) |
| | | | | | GAGGAGAGCATCTGCTCTGAGACGG | (SEQ ID NO: 5043) |
| | | | | | GGAAGGAGAGAGGTTGAGGATGCAC | (SEQ ID NO: 5044) |
| 216682_s_{—} | FAM48A | RGD1307812 | Family with | 55578 | CAGAAAAACTCATTGGTTACCATCA | (SEQ ID NO: 5045) |
| at | | | sequence | | GTTACCATCAGAGTTTGCTAGGGCA | (SEQ ID NO: 5046) |
| | | | similarity 48, | | GGGCATCAGATTCTTACTCTGAAGA | (SEQ ID NO: 5047) |
| | | | member A | | AGAATATAATATTTATCCTGCCCTT | (SEQ ID NO: 5048) |
| | | | | | TCCTGCCCTTCTTGTTATGAACTGT | (SEQ ID NO: 5049) |
| | | | | | GGAAAATTTCCAGCTAATAGGTGCA | (SEQ ID NO: 5050) |
| | | | | | GTAGTGAATCTAGACAGCAGTATTT | (SEQ ID NO: 5051) |
| | | | | | TCTGATCAAACCCACTGATTGAAGA | (SEQ ID NO: 5052) |
| | | | | | GACAGTCAATTATTGTGTACCTCCT | (SEQ ID NO: 5053) |
| | | | | | GTGTACCTCCTGGTTTGATGCAAGA | (SEQ ID NO: 5054) |
| | | | | | GATGCAAGAGACAGTACACAACAGT | (SEQ ID NO: 5055) |
| 217731_s_{—} | ITM2B | RP11- | integral | 9445 | TTCCACCTTTATGTTTTAATATCCT | (SEQ ID NO: 5056) |
| at | | 196P14.1, | membrane | | TGTTTTAATATCCTAGGCATCTGCT | (SEQ ID NO: 5057) |
| | | ABRI, BRI, | protein 2B | | CCTAGGCATCTGCTGTAATAATATT | (SEQ ID NO: 5058) |
| | | BRI2, | | | ATAACTTGTGTTACTAATTTGTATA | (SEQ ID NO: 5059) |
| | | BRICD2B, | | | TAATTTGTATAACCCATATCTGTGC | (SEQ ID NO: 5060) |
| | | E25B, E3-16, | | | TGTATAACCCATATCTGTGCAATGG | (SEQ ID NO: 5061) |
| | | FBD | | | AAGTTGTTTAACTAGACTGCGTGTT | (SEQ ID NO: 5062) |
| | | | | | ACTAGACTGCGTGTTGTTTTTCCCG | (SEQ ID NO: 5063) |
| | | | | | GAATAGTTTGGTTCTTCAAATCTTA | (SEQ ID NO: 5064) |
| | | | | | CAAATCTTAAGAGAATCCACATAAA | (SEQ ID NO: 5065) |
| | | | | | AAAATTCACTTCTATATATACAATG | (SEQ ID NO: 5066) |
| 217861_s_{—} | PREB | MGC3467, | prolactin | 10113 | GTCCACAGCTGAGGTTGCCTCTGAC | (SEQ ID NO: 5067) |
| at | | SEC12 | regulatory | | AAAAGGCTTGGCTATGGCCCTGTGT | (SEQ ID NO: 5068) |
| | | | element | | CTTCGTCATCTGTGGATCCATCCAG | (SEQ ID NO: 5069) |
| | | | binding | | GAACAGCGGTATCTGAAGCCCAGGC | (SEQ ID NO: 5070) |
| | | | | | AGAGGCTCCAGAGTTGAGCTTGTCC | (SEQ ID NO: 5071) |
| | | | | | GATGCCCAAGAGCCTGGAGGCACTG | (SEQ ID NO: 5072) |
| | | | | | CTGCAGAAACAGTTTCTCCTCCTCC | (SEQ ID NO: 5073) |
| | | | | | ACATGAAGCCCCTGGCATTTGCTGG | (SEQ ID NO: 5074) |
| | | | | | GATGGGTAGCACTAAGCCAGCTGGC | (SEQ ID NO: 5075) |
| | | | | | AGCCAGCTGGCCTAAAGATGCAATA | (SEQ ID NO: 5076) |
| | | | | | ATGAACCTCAGCCCATTAGGCAGGA | (SEQ ID NO: 5077) |
| 217870_s_{—} | CMPK1 | RP11-511i2.1, | cytidine | 51727 | GGAATGAGTTCTTATCTAGTGTTGC | (SEQ ID NO: 5078) |
| at | | CMK, CMPK, | monophosphate | | TCTTATCTAGTGTTGCAGGCCAGCA | (SEQ ID NO: 5079) |
| | | UMK, UMP- | (UMP-CMP) | | GGTTTCGAGAGCATTCCTACTCACA | (SEQ ID NO: 5080) |
| | | CMPK, UMPK | kinase 1 | | GAGCATTCCTACTCACATAAGTGAA | (SEQ ID NO: 5081) |
| | | | cytosolic | | TGAGACTAGGTGCTTTGCTTCCTTT | (SEQ ID NO: 5082) |
| | | | | | GCTTCCTTTCATCAGGTATCTTTCT | (SEQ ID NO: 5083) |
| | | | | | AGGTATCTTTCTGTGGCATTTGAGA | (SEQ ID NO: 5084) |
| | | | | | TTACTAAATTATGAGGCTTTGCTTT | (SEQ ID NO: 5085) |
| | | | | | TAACTAGTTTTGTCATTCCATTTGT | (SEQ ID NO: 5086) |
| | | | | | GATACAGTCACCAAGAATGTTTTGA | (SEQ ID NO: 5087) |
| | | | | | AGACCCCAATTTAAGCCTTGCTTAT | (SEQ ID NO: 5088) |
| 217933_s_{—} | LAP3 | LAP, LAPEP, | leucine | 51056 | ATGTACAGCTGCAGCATTCCTGAAA | (SEQ ID NO: 5089) |
| at | | PEPS | aminopeptidase | | GTAACTCATCCTAAGTGGGCACATT | (SEQ ID NO: 5090) |
| | | | 3 | | TGGGCACATTTAGACATAGCAGGCG | (SEQ ID NO: 5091) |
| | | | | | GCAGGCGTGATGACCAACAAAGATG | (SEQ ID NO: 5092) |
| | | | | | GAAGTTCCCTATCTACGGAAAGGCA | (SEQ ID NO: 5093) |
| | | | | | GAAAGGCATGACTGGGAGGCCCACA | (SEQ ID NO: 5094) |
| | | | | | GGCCCACAAGGACTCTCATTGAGTT | (SEQ ID NO: 5095) |
| | | | | | GAGTTCTTACTTCGTTTCAGTCAAG | (SEQ ID NO: 5096) |
| | | | | | GACAATGCTTAGTTCAGATACTCAA | (SEQ ID NO: 5097) |
| | | | | | AGAACTTCCTAATCACTTTTCAGAG | (SEQ ID NO: 5098) |
| | | | | | GAAAATTACTATGCACTTGTCAGAA | (SEQ ID NO: 5099) |
| 218126_at | FAM82C | RMD3; | family with | 55177 | CTTTTTTCCTTAGACCTTGCTGAGA | (SEQ ID NO: 5100) |
| | | FAM82A2; | sequence | | ACCACACAAATCTGTCTCCTGGGTC | (SEQ ID NO: 5101) |
| | | FAM82C; | similarity 82, | | TACCACTCCCCATTAGTTAATTTAT | (SEQ ID NO: 5102) |
| | | hRMD-3; | member C | | GTTGTTCTCTCCCTTGAGTAATCTC | (SEQ ID NO: 5103) |
| | | ptpip51; | | | ACCTGCCCCAGGATTACACATGGGT | (SEQ ID NO: 5104) |
| | | FLJ10579 | | | GGTAGAGCCTGCAAGACCTGAGACC | (SEQ ID NO: 5105) |
| | | | | | GACCTGAGACCTTCCAATTGCTGGT | (SEQ ID NO: 5106) |
| | | | | | CAGAGTGGCCCACAGACATTGCTTT | (SEQ ID NO: 5107) |
| | | | | | GAATTCTACCTGTATTCCAGGGCTG | (SEQ ID NO: 5108) |
| | | | | | AGGGCTGGACCACTTGATAACTTCC | (SEQ ID NO: 5109) |
| | | | | | AACTTCCAGTGTCCTGGCAGCTTTT | (SEQ ID NO: 5110) |
| 218434_s_{—} | AACS | ACSF1, | acetoacetyl- | 65985 | GGATCTCTTTATTGCACAGACTGAA | (SEQ ID NO: 5111) |
| at | | FLJ12389, | CoA | | TGTGAAGCAGTGGGTGTCCACCCGT | (SEQ ID NO: 5112) |
| | | FLJ41251, | synthetase | | TGTGGTCACCGAGTGAGGACCCTCC | (SEQ ID NO: 5113) |
| | | SUR-5 | | | CTGCCTCCACCTGAGAGTTGCTAGG | (SEQ ID NO: 5114) |
| | | | | | GTTGCTAGGGGGTTCTTGTCGAGAT | (SEQ ID NO: 5115) |
| | | | | | TGTCGAGATCATGTCATCAGCACCC | (SEQ ID NO: 5116) |
| | | | | | CCTAAGTCAAGTCACGGGTTTCCAT | (SEQ ID NO: 5117) |
| | | | | | GGGTTTCCATAGCCAGGCAGTTGGT | (SEQ ID NO: 5118) |
| | | | | | TGGTATGTACAATTCAGTTCAGCGT | (SEQ ID NO: 5119) |
| | | | | | TCAGCGTATGAACTTGTATCTCTAA | (SEQ ID NO: 5120) |
| | | | | | GTATCTCTAATCTGATGTCCATTTT | (SEQ ID NO: 5121) |
| 218551_at | RP5- | IIP45; | invasion | 60672 | CCACCGGCGAAAGAGCTTTGACGCC | (SEQ ID NO: 5122) |
| | 1077B9.4 | FLJ12438; | inhibitory | | CGAAAGAGCTTTGACGCCTCTGACA | (SEQ ID NO: 5123) |
| | | FLJ38609 | protein 45 | | GTCTGAGAAAAGCTCAGCCCCCAGG | (SEQ ID NO: 5124) |
| | | | | | TAGGTTGGGCAGGTGGGTGGACCCA | (SEQ ID NO: 5125) |
| | | | | | AGGTGGGTGGACCCAAGCTTGTCTG | (SEQ ID NO: 5126) |
| | | | | | TTGTCTGCTGCCTGAGTTCCAGAGA | (SEQ ID NO: 5127) |
| | | | | | GTCTGCTGCCTGAGTTCCAGAGAGG | (SEQ ID NO: 5128) |
| | | | | | GAGTTCCAGAGAGGGAGGACCCTGG | (SEQ ID NO: 5129) |
| | | | | | CAGAGAGGGAGGACCCTGGGGTGGA | (SEQ ID NO: 5130) |
| | | | | | GGGGTGGAGGGTGAGGGATTCTGTG | (SEQ ID NO: 5131) |
| | | | | | GTGGAGGGTGAGGGATTCTGTGGAA | (SEQ ID NO: 5132) |
| 218622_at | NUP37 | FLJ22618, | mucleoporin | 79023 | CAATCCGGTTTTATGATCTTTTGGC | (SEQ ID NO: 5133) |
| | | MGC5585, p37 | 37 kDa | | GGCCCAACAGGCTATTTTATCTCTT | (SEQ ID NO: 5134) |
| | | | | | ACACCTTCAAAGTTGGAGCCGTTGC | (SEQ ID NO: 5135) |
| | | | | | TATTACTCGGTCCAGTTATCCTCAA | (SEQ ID NO: 5136) |
| | | | | | GAGACCTGTTCACATGGATCGAGCC | (SEQ ID NO: 5137) |
| | | | | | GAGCCTGCTTATTCAGGTGGTCCAC | (SEQ ID NO: 5138) |
| | | | | | TGCAACCACTGGTTATCCTGGCAAA | (SEQ ID NO: 5139) |
| | | | | | TTCATCATTTAGGACACCCTCAGCC | (SEQ ID NO: 5140) |
| | | | | | ACTCTCCCTCTGTGTGTAATTGGAG | (SEQ ID NO: 5141) |
| | | | | | GAGACCACAAGCTGTTGTTTTGGGT | (SEQ ID NO: 5142) |
| | | | | | AAGTGTTTTCTGTACCTTAGATTCA | (SEQ ID NO: 5143) |
| 218686_s_{—} | RHBDF1 | C16orf8, | rhomboid 5 | 64285 | TGGATTGACAACTTTGCCCACATCT | (SEQ ID NO: 5144) |
| at | | Dist1, | homolog 1 | | CACATCTCGGGGTTCATCAGTGGCC | (SEQ ID NO: 5145) |
| | | EGFR-RS, | (Drosophila) | | AAACGCTGCCAGATCATCATCTTTC | (SEQ ID NO: 5146) |
| | | FLJ2235, | | | ATCTTTCAGGTGGTCTTCCTGGGCC | (SEQ ID NO: 5147) |
| | | FLJ22357, | | | ATCCCCTTCACTGACAAGTTCTGTG | (SEQ ID NO: 5148) |
| | | gene-89, gene- | | | GAAGTACGAACTGGACGCTCAGCTC | (SEQ ID NO: 5149) |
| | | 90, hDist1 | | | TACAGGAGTCACCTGCTCCATGTGG | (SEQ ID NO: 5150) |
| | | | | | GGCCTGTTTCCTGAACACAGACCTC | (SEQ ID NO: 5151) |
| | | | | | ACTGCCGGGCATTTATTATACTACT | (SEQ ID NO: 5152) |
| | | | | | TACTTCCTGTCATAACCTTCTAACT | (SEQ ID NO: 5153) |
| | | | | | CTTGACGACCACCTCATGTGGCCAA | (SEQ ID NO: 5154) |
| 219148_at | PBK | SPK; TOPK; | PDZ binding | 55872 | AGCATACTATGCAGCGTTGGGAACT | (SEQ ID NO: 5155) |
| | | Nori-3; | kinase | | CAGCGTTGGGAACTAGGCCACCTAT | (SEQ ID NO: 5156) |
| | | FLJ14385 | | | TGAACTCTTCTCTGTATGCACTAAT | (SEQ ID NO: 5157) |
| | | | | | AGACCCTAAAGATCGTCCTTCTGCT | (SEQ ID NO: 5158) |
| | | | | | ATGTCTAGTGATCATCTCAGCTGAA | (SEQ ID NO: 5159) |
| | | | | | GTGTGGCTTGCGTAAATAACTGTTT | (SEQ ID NO: 5160) |
| | | | | | GAGGACCATAGTTTCTTGTTAACAT | (SEQ ID NO: 5161) |
| | | | | | AAGCACTTGGAATTGTACTGGGTTT | (SEQ ID NO: 5162) |
| | | | | | GTACTTTGATACTGCTCATGCTGAC | (SEQ ID NO: 5163) |
| | | | | | TGCTCATGCTGACTTAAAACACTAG | (SEQ ID NO: 5164) |
| | | | | | GGATCTACTGACATTAGCACTTTGT | (SEQ ID NO: 5165) |
| 219258_at | TIPIN | FLJ20516 | TIMELESS | 54962 | GAACATGATGTCACTTCTACTGAAT | (SEQ ID NO: 5166) |
| | | | interacting | | CTACTGAATTAGATCCCTTTCTGAC | (SEQ ID NO: 5167) |
| | | | protein | | GATCCCTTTCTGACAAACTTATCTG | (SEQ ID NO: 5168) |
| | | | | | GTTAATGAATACACCCAGGGCACAC | (SEQ ID NO: 5169) |
| | | | | | CCCAGGGCACACACGGTTGAAGAGG | (SEQ ID NO: 5170) |
| | | | | | AACGAAGACATTCTGGACAATCCAT | (SEQ ID NO: 5171) |
| | | | | | GAAACACTGCTGGACCAGTCTTTTA | (SEQ ID NO: 5172) |
| | | | | | GCAACAGCAACTTGATGCTACATCC | (SEQ ID NO: 5173) |
| | | | | | TGTATCTGTTAAGTCATCGTCCTGC | (SEQ ID NO: 5174) |
| | | | | | TTAAGTCATCGTCCTGCAAGCTTGG | (SEQ ID NO: 5175) |
| | | | | | GCAAGCTTGGCGTTACTATGTATTT | (SEQ ID NO: 5176) |
| 219315_s_{—} | TMEM204 | C16orf30, | transmembrane | 79652 | CTACGTGGAGTCACCATGCTGAGTC | (SEQ ID NO: 5177) |
| at | | CLP24, | protein | | CACACCTGCTATCGTGGAACAGCCT | (SEQ ID NO: 5178) |
| | | FLJ20898, | 204 | | ACGGGATGAGTCTGGGTGACCTCTG | (SEQ ID NO: 5179) |
| | | MGc111564 | | | GTGCGTTTACTGTTATGTCGGTCAT | (SEQ ID NO: 5180) |
| | | | | | GTCGGTCATATGTCTGTACGTGTCG | (SEQ ID NO: 5181) |
| | | | | | TCCAGCTTTCCTGGTTAGCGCAACG | (SEQ ID NO: 5182) |
| | | | | | ACAGGTTAGGTGGCGCGAGGCTGCC | (SEQ ID NO: 5183) |
| | | | | | CGCTCCGCTTTGCTTTGGGATTAAT | (SEQ ID NO: 5184) |
| | | | | | TCTGCATCTGCTGAGAGGGGCACCC | (SEQ ID NO: 5185) |
| | | | | | CCCCAGCCATATCTTACACTTTGGT | (SEQ ID NO: 5186) |
| | | | | | GAATCGTGTTCGTGTCTGTTTTGCT | (SEQ ID NO: 5187) |
| 219649_at | ALG6 | 0 | asparagine- | 29929 | TTTAGTATGCTACCTCTTCTATTGA | (SEQ ID NO: 5188) |
| | | | linked | | AAGGATGAACTCCTAATGCCCTCTG | (SEQ ID NO: 5189) |
| | | | glycosylation | | CTAATGCCCTCTGTTGTGACAACAA | (SEQ ID NO: 5190) |
| | | | 6 homolog | | TATAGCTTGTGTAACTTCCTTTTCA | (SEQ ID NO: 5191) |
| | | | (S. | | TTGTTTCTTATCTCAGTCATCACTA | (SEQ ID NO: 5192) |
| | | | cerevisiae, | | CACTATGGTGCTTCTGACGTTGATG | (SEQ ID NO: 5193) |
| | | | alpha-1,3- | | GACGTTGATGACTGTCACACTGGAT | (SEQ ID NO: 5194) |
| | | | glucosyl- | | TGGATCCTCCTCAGAAACTACCGGA | (SEQ ID NO: 5195) |
| | | | transferase) | | ATTGGTGTGTTTTGTATCTTGCTTG | (SEQ ID NO: 5196) |
| | | | | | ATCTTGCTTGAACTTCCTGTTCTTC | (SEQ ID NO: 5197) |
| | | | | | ACTTCCTGTTCTTCTTGGTATACTT | (SEQ ID NO: 5198) |
| 219789_at | NPR3 | ANPRC, | natriuretic | 4883 | TTATGATTAATCACCATCTGCCTCC | (SEQ ID NO: 5199) |
| | | GUCY2B, | peptide | | CCAGGCCTTTCATCTCATGACAAAC | (SEQ ID NO: 5200) |
| | | NPRC | receptor | | ATCGTGTCACTCTGTTAAATGTTCA | (SEQ ID NO: 5201) |
| | | | C/guanylate | | TGTTCATACTGTTTCAAGCCCATAT | (SEQ ID NO: 5202) |
| | | | cyclase C | | TGTTGTCTCCATATCTTGATGGCTT | (SEQ ID NO: 5203) |
| | | | (atrionatri- | | GGCTTTTGGGAGCATTTCACACAAG | (SEQ ID NO: 5204) |
| | | | uretic peptide | | CAGGTTTGTGGTTGAGGACTTCTCT | (SEQ ID NO: 5205) |
| | | | receptor C) | | GGACTTCTCTGTCCGATGTCTACAT | (SEQ ID NO: 5206) |
| | | | | | GTCTACATTCAGGTTCTGACTTCAT | (SEQ ID NO: 5207) |
| | | | | | TCCCTGTCTTTTTCAGTGTCTCATA | (SEQ ID NO: 5208) |
| | | | | | GTCTCATAAACGCTACTCTGGATTG | (SEQ ID NO: 5209) |
| 220232_at | SCD5 | ACOD4, | stearoyl-CoA | 79966 | ACCTGTACACGTTGATTATTTTTGT | (SEQ ID NO: 5210) |
| | | FADS4, | desaturase 5 | | GAGTTTAAGCTATCATTTCCAGATG | (SEQ ID NO: 5211) |
| | | FLJ21032, | | | GGAGAGTTCCATAGATGTCTGTTAG | (SEQ ID NO: 5212) |
| | | HSCD5, | | | ATCCTTGTTAATTTTCTGTCTTGTT | (SEQ ID NO: 5213) |
| | | SCD2, SCD4 | | | TAAAGTCTCCCACTATTATTATATG | (SEQ ID NO: 5214) |
| | | | | | GTCTAAGTCTCCTTGTAGGTCTCTA | (SEQ ID NO: 5215) |
| | | | | | GGGTGCTCCTGTATTAGGTGCATAC | (SEQ ID NO: 5216) |
| | | | | | TTATATAATGCCCTTCTTTGTCTTT | (SEQ ID NO: 5217) |
| | | | | | TAAATATTCCTGTATCCCTTTATTT | (SEQ ID NO: 5218) |
| | | | | | GTCTTTGCACGTGAGGTGGGTCTCC | (SEQ ID NO: 5219) |
| | | | | | CTGAATACAGCACACCGATGGGTTT | (SEQ ID NO: 5220) |
| 220441_at | FLJ13236 | FLJ13236, wus | hypothetical | 79962 | GTCAGCTGGCTTACCAGGTTTTGGG | (SEQ ID NO: 5221) |
| | | | protein | | TTACCAGGTTTTGGGCCTCTCAGAA | (SEQ ID NO: 5222) |
| | | | FLJ13236 | | TACATCGGAGTTACCAGGAGCTAGT | (SEQ ID NO: 5223) |
| | | | | | GGAGCTAGTGAAGGTCTGGCACCCA | (SEQ ID NO: 5224) |
| | | | | | AGATCCAGGCTGCGTATGAAGTCCT | (SEQ ID NO: 5225) |
| | | | | | GTCCTGAGTCAACCCAGGAAGCCCT | (SEQ ID NO: 5226) |
| | | | | | CCTGAGGACTGACTCTTCCTAGCAG | (SEQ ID NO: 5227) |
| | | | | | CTAGCAGAGCTGGGCAACTTGTCCC | (SEQ ID NO: 5228) |
| | | | | | GGCAACTTGTCCCAAATCTAGCTTT | (SEQ ID NO: 5229) |
| | | | | | CCAAATCTAGCTTTGCCCACGAATG | (SEQ ID NO: 5230) |
| | | | | | TTGCCCACGAATGGCATCCCAACAG | (SEQ ID NO: 5231) |
| 220596_at | GPATCH4 | RP11- | G patch | 54865 | TCTTCTGCAAATTTCCCTTTAAACT | (SEQ ID NO: 5232) |
| | | 284F21.4, | domain | | TCCTCCTTTAATTAAATGGACTACA | (SEQ ID NO: 5233) |
| | | GPATC4 | containing 4 | | GGACTACATGGGGGGGTAATCCAGG | (SEQ ID NO: 5234) |
| | | | | | GCTTTCCCCTGGGCAGATGGTAGGC | (SEQ ID NO: 5235) |
| | | | | | GGCAGATGGTAGGCAGGGAGCTGGG | (SEQ ID NO: 5236) |
| | | | | | ATGGGGATCACCTTGAGTCCATCCA | (SEQ ID NO: 5237) |
| | | | | | GAGGTGATATCATCCTTTTAAGAAG | (SEQ ID NO: 5238) |
| | | | | | GTAGAAAGTGCCCAAACAGCCATCA | (SEQ ID NO: 5239) |
| | | | | | CAAACAGCCATCAGTTCCATCCTGA | (SEQ ID NO: 5240) |
| | | | | | TCAGTTCCATCCTGACTGCTTGTTA | (SEQ ID NO: 5241) |
| | | | | | TGACTGCTTGTTAAGAATTCTCTGC | (SEQ ID NO: 5242) |
| 220794_at | GREM2 | PRDC; | gremlin 2, | 64388 | CGCCCCCTATTTGTGGACTAAAGAT | (SEQ ID NO: 5243) |
| | | DAND3; | cysteine knot | | GATGAACTCTGGTGTGCATGCTATT | (SEQ ID NO: 5244) |
| | | CKTSF1B2 | superfamily, | | AAGGTCTCTATATTAACGCTGGTTT | (SEQ ID NO: 5245) |
| | | | homolog | | TCACATGTTTTGACTCTGGCTTGCA | (SEQ ID NO: 5246) |
| | | | (Xenopus | | TGGCTTGCAGCACCATTCGGAGTAA | (SEQ ID NO: 5247) |
| | | | laevis) | | GGAGTAAGGATGACAGCAGGCCCAG | (SEQ ID NO: 5248) |
| | | | | | AGCAGGCCCAGAAGGTGTTTTACTC | (SEQ ID NO: 5249) |
| | | | | | CAGCAATTCACTGTCATGCACCTAT | (SEQ ID NO: 5250) |
| | | | | | TTCACTGACGTTACTAAGCATTGCA | (SEQ ID NO: 5251) |
| | | | | | AAACCGTATACTACTTTCACTGCCA | (SEQ ID NO: 5252) |
| | | | | | CTACTTTCACTGCCATGACACTAGG | (SEQ ID NO: 5253) |
| 220960_x_{—} | RPL22 | EAP, HBP15, | ribosomal | 6146 | AATTCTGATGTCGTACCTAAGGCTT | (SEQ ID NO: 5254) |
| at | | HBP15/L22 | protein L22 | | ACCTAAGGCTTGTCCATCTTTGTTG | (SEQ ID NO: 5255) |
| | | | | | TTGTTGGAGGTGCCATGGCTCCTGT | (SEQ ID NO: 5256) |
| | | | | | TGAAGTTCACTCTTGATTGCACCCA | (SEQ ID NO: 5257) |
| | | | | | ATTGCACCCACCCTGTAGAAGATGG | (SEQ ID NO: 5258) |
| | | | | | GGAGCAAGAGCAAGATCACCGTGAC | (SEQ ID NO: 5259) |
| | | | | | ATCACCGTGACATCCGAGGTGCCTT | (SEQ ID NO: 5260) |
| | | | | | GAATAATCTACGTGACTGGTTGCGC | (SEQ ID NO: 5261) |
| | | | | | CTGGTTGCGCGTAGTTGCTAACAGC | (SEQ ID NO: 5262) |
| | | | | | TACGAATTACGTTACTTCCAGATTA | (SEQ ID NO: 5263) |
| | | | | | TTTATCCTTGTATCTCTGCAGTGTG | (SEQ ID NO: 5264) |
| 221221_s_{—} | KLHL3 | FLJ40871, | kelch-like 3 | 26249 | GGATAATTACAGCCTCATAGCCCCT | (SEQ ID NO: 5265) |
| at | | KIAA1129, | (Drosophila) | | AGCCTTCGTCATGGGACTCAGTGAC | (SEQ ID NO: 5266) |
| | | MGC44594 | | | GCACAGGACTGTGGCATTTGCAGCA | (SEQ ID NO: 5267) |
| | | | | | AAATCACCCTAGTGCCATGTTTGGT | (SEQ ID NO: 5268) |
| | | | | | TAGAGGACCCTTGTTGTACTTCTTG | (SEQ ID NO: 5269) |
| | | | | | GTCCCTGTGGTTGTCATAGCCAGTC | (SEQ ID NO: 5270) |
| | | | | | GTCAGACTTGATCACTGACACCCCG | (SEQ ID NO: 5271) |
| | | | | | GACACCCCGTACAACATATTGCATA | (SEQ ID NO: 5272) |
| | | | | | TAAGATCCTCGATCTGGTGTTCTCT | (SEQ ID NO: 5273) |
| | | | | | GTTCTCTGCGTGGCTGTTAGGGACT | (SEQ ID NO: 5274) |
| | | | | | GAACACTTGTCACATGCTTGATCAG | (SEQ ID NO: 5275) |
| 221265_s_{—} | C15orf44 | DKFZp564O1664 | chromosome | 81556 | TCACCTCTAGAATAGCCACCCAAAG | (SEQ ID NO: 5276) |
| at | | | 15 open | | AGACCTTCCTGAGGCTGCCTCAGAA | (SEQ ID NO: 5277) |
| | | | reading | | CCTCAGAAGCACCACTTGCTGTTTT | (SEQ ID NO: 5278) |
| | | | frame 44 | | GAAGATAGCTGCTGTTCCCATGATG | (SEQ ID NO: 5279) |
| | | | | | TCCCATGATGGGCACATTTCCTGAG | (SEQ ID NO: 5280) |
| | | | | | ACTGATGAGCATAGAGCACCCCTGC | (SEQ ID NO: 5281) |
| | | | | | CAGGAAACCTGACCGGCAGGGGCTC | (SEQ ID NO: 5282) |
| | | | | | CTCTGGCTTCCTGAAAGCTTCACCT | (SEQ ID NO: 5283) |
| | | | | | TCTTCCCTCGTTTATATCTCAACTG | (SEQ ID NO: 5284) |
| | | | | | GCAACTCAGACTGTCTGGAGCTTGC | (SEQ ID NO: 5285) |
| | | | | | GTTTCAGAACTTTCCTTAGGACTTG | (SEQ ID NO: 5286) |
| 221654_s_{—} | USP3 | MGC129878, | ubiquitin | 9960 | TCTCACTTTGAGGCACATTTACATC | (SEQ ID NO: 5287) |
| at | | MGC129879, | specific | | TACATCAATGCTTTTGTTCCTCTCA | (SEQ ID NO: 5288) |
| | | SIH003, UBP | peptidase 3 | | AAGCAAGATGTGTTCCTTATTGTGA | (SEQ ID NO: 5289) |
| | | | | | GTGAAGAGCGACACAACTGCCTGCT | (SEQ ID NO: 5290) |
| | | | | | GCTGCCTTTCCACAGCTATAATGGA | (SEQ ID NO: 5291) |
| | | | | | TGGACATCAGGTTGACTCTAAATCA | (SEQ ID NO: 5292) |
| | | | | | GTGTGCACAATACTTGTGGCCCACA | (SEQ ID NO: 5293) |
| | | | | | GACCAGGTAATTACTGCTTGTCTCT | (SEQ ID NO: 5294) |
| | | | | | TTACTGCTTGTCTCTCAAGGCTGCT | (SEQ ID NO: 5295) |
| | | | | | TCAAGGCTGCTGTCTTTATCAGCAC | (SEQ ID NO: 5296) |
| | | | | | GGTTCAGTTGTACTTGTCCTGCAAA | (SEQ ID NO: 5297) |
| 221747_at | TNS1 | MSTP091, | tensin 1 | 7145 | CCTCTGTCCTCAAATGTCCAAAATG | (SEQ ID NO: 5298) |
| | | DKFZp586K0617, | | | TTGGAGGACCTCTGTTCATATCCCA | (SEQ ID NO: 5299) |
| | | MGC88584, | | | GGCTCTTGCCAGCAGTGGAGTTACT | (SEQ ID NO: 5300) |
| | | MST091, | | | GAGTTACTGTAGAGGGATGTCCCAA | (SEQ ID NO: 5301) |
| | | MST122, | | | AGAGGGATGTCCCAAGCTTGTTTTC | (SEQ ID NO: 5302) |
| | | MST127, | | | TTTGAAACTCTCCTGTGTCTGTGTT | (SEQ ID NO: 5303) |
| | | MSTP122, | | | GTGTGTGAGAGCACATCAGTGTGTG | (SEQ ID NO: 5304) |
| | | MSTP127, | | | GCACATCAGTGTGTGCAGGCTGTGT | (SEQ ID NO: 5305) |
| | | MSRA6, TNS | | | TCCCTTCAGACCCATCATTGAGAAC | (SEQ ID NO: 5306) |
| | | | | | CAGGCCCTCTGCGGGGGAAACAAGA | (SEQ ID NO: 5307) |
| | | | | | GGGAAACAAGATCACCCAGCATCCT | (SEQ ID NO: 5308) |
| 222357_at | ZBTB20 | RP23- | zinc finger | 26137 | CGTCGACCTCCCTATGGATTGTTAA | (SEQ ID NO: 5309) |
| | | 238M18.1, | and BTB | | GGATTGTTAAGGGCCCTGTGCATAT | (SEQ ID NO: 5310) |
| | | 1300017A20Rik, | domain | | GGCCCTGTGCATATTTGCATGTAGC | (SEQ ID NO: 5311) |
| | | 7330412A13Rik, | containing 20 | | TGCATGTAGCCAAAGATTCAGTCTC | (SEQ ID NO: 5312) |
| | | A930017C21Rik, | | | GATTCAGTCTCTTGCAGGAACTCTG | (SEQ ID NO: 5313) |
| | | D16Wsu73e, | | | GCAGGAACTCTGGTTGTCAACTGGT | (SEQ ID NO: 5314) |
| | | DPZF, HOF, | | | TCAACTGGTGATCTTGCCTTTGTCT | (SEQ ID NO: 5315) |
| | | ODA-8S, | | | AGGACAATTTTACCATTCTCTCCTG | (SEQ ID NO: 5316) |
| | | Oda8, Zfp288 | | | TTTTAGTGCCGGTACATGAATTTGT | (SEQ ID NO: 5317) |
| | | | | | TATTCTTTATAATTCCCTTTGAAGT | (SEQ ID NO: 5318) |
| | | | | | GGGGAATCTAAAACCGACCAGATGT | (SEQ ID NO: 5319) |
| 34408_at | RTN2 | NSP2, NSPL1 | reticulon 2 | 6253 | TCCGAGCTAAAATCCCAGGGACCGG | (SEQ ID NO: 5320) |
| | | | | | TTACCTGAGCGACCAGGACTACATT | (SEQ ID NO: 5321) |
| | | | | | GCCTGCTGGGACTTGTAGTTGCCTA | (SEQ ID NO: 5322) |
| | | | | | TGCTGGGACTTGTAGTTGCCTAGAC | (SEQ ID NO: 5323) |
| | | | | | TGGGACTTGTAGTTGCCTAGACAGG | (SEQ ID NO: 5324) |
| | | | | | TGTAGTTGCCTAGACAGGGCACCAC | (SEQ ID NO: 5325) |
| | | | | | GTAGTTGCCTAGACAGGGCACCACC | (SEQ ID NO: 5326) |
| | | | | | AGGCGTTGGTGTCTCCTGGATGCTA | (SEQ ID NO: 5327) |
| | | | | | GGCGTTGGTGTCTCCTGGATGCTAC | (SEQ ID NO: 5328) |
| | | | | | GCGTTGGTGTCTCCTGGATGCTACT | (SEQ ID NO: 5329) |
| | | | | | CGTTGGTGTCTCCTGGATGCTACTA | (SEQ ID NO: 5330) |
| | | | | | GGGAGGCCTGAGCTTGGATTTACAC | (SEQ ID NO: 5331) |
| | | | | | GGAGGCCTGAGCTTGGATTTACACT | (SEQ ID NO: 5332) |
| | | | | | GGCCTGAGCTTGGATTTACACTGTA | (SEQ ID NO: 5333) |
| | | | | | CTGAGCTrGGATTTACACTGTAATA | (SEQ ID NO: 5334) |
| | | | | | CTTGGATTTACACTGTAATAAAGAC | (SEQ ID NO: 5335) |
| 58780_s_{—} | FLJ10357 | SOLO | hypothetical | 55701 | CTGGAGTCCCTGGTGACTCCATTCT | (SEQ ID NO: 5336) |
| at | | | protein | | GAGTCCCTGGTGACTCCATTCTGAG | (SEQ ID NO: 5337) |
| | | | FLJ10357 | | GTCCCTGGTGACTCCATTCTGAGGT | (SEQ ID NO: 5338) |
| | | | | | TCCCTGGTGACTCCATTCTGAGGTG | (SEQ ID NO: 5339) |
| | | | | | CTGGTGACTCCATTCTGAGGTGTCA | (SEQ ID NO: 5340) |
| | | | | | GGTGACTCCATTCTGAGGTGTCACA | (SEQ ID NO: 5341) |
| | | | | | GACTCCATTCTGAGGTGTCACAAGC | (SEQ ID NO: 5342) |
| | | | | | CTCCATTCTGAGGTGTCACAAGCAA | (SEQ ID NO: 5343) |
| | | | | | TCCATTCTGAGGTGTCACAAGCAAT | (SEQ ID NO: 5344) |
| | | | | | ATTCTGAGGTGTCACAAGCAATGAA | (SEQ ID NO: 5345) |
| | | | | | TTCTGAGGTGTCACAAGCAATGAAG | (SEQ ID NO: 5346) |
| | | | | | TCTGAGGTGTCACAAGCAATGAAGC | (SEQ ID NO: 5347) |
| | | | | | TGAGGTGTCACAAGCAATGAAGCTA | (SEQ ID NO: 5348) |
| | | | | | AGGTGTCACAAGCAATGAAGCTATG | (SEQ ID NO: 5349) |
| | | | | | GTGTGACAGGGGAACCGTAGACTTT | (SEQ ID NO: 5350) |
| | | | | | TGTGACAGGGGAACCGTAGACTTTA | (SEQ ID NO: 5351) |
| 64408_s_{—} | CALML4 | MGC4809, | calmodulin- | 91860 | GAAAGAAATTCTTCTAGCCATGTTG | (SEQ ID NO: 5352) |
| at | | NY-BR-20 | like 4 | | ATTCTTCTAGCCATGTTGATGGTGG | (SEQ ID NO: 5353) |
| | | | | | CTTCTAGCCATGTTGATGGTGGACA | (SEQ ID NO: 5354) |
| | | | | | CTAGCCATGTTGATGGTGGACAAGG | (SEQ ID NO: 5355) |
| | | | | | CGGTCAAAACTCACGAGTCTGGGGG | (SEQ ID NO: 5356) |
| | | | | | GGTCAAAACTCACGAGTCTGGGGGA | (SEQ ID NO: 5357) |
| | | | | | GATCACCCTTCCTGGACGGGACTAT | (SEQ ID NO: 5358) |
| | | | | | CACCCTTCCTGGACGGGACTATTGA | (SEQ ID NO: 5359) |
| | | | | | TTCCTGGACGGGACTATTGAAGGAG | (SEQ ID NO: 5360) |
| | | | | | CTCCCCTGGGCCTGAAAACTTGGAG | (SEQ ID NO: 5361) |
| | | | | | CCTGGGCCTGAAAACTTGGAGCAAT | (SEQ ID NO: 5362) |
| | | | | | CTGGGCCTGAAAACTTGGAGCAATT | (SEQ ID NO: 5363) |
| | | | | | AACACAGTGGCAAGACAACATTACC | (SEQ ID NO: 5364) |
| | | | | | AACATTACCCAACTATAGAAGAGAG | (SEQ ID NO: 5365) |
| | | | | | TACCCAACTATAGAAGAGAGGCTAA | (SEQ ID NO: 5366) |
| | | | | | ACCCAACTATAGAAGAGAGGCTAAC | (SEQ ID NO: 5367) |
| 290132_s_{—} | COMMD4 | FLJ20452 | COMM | | TCTGCAGCCTACGCATGAATAGGTT | (SEQ ID NO: 5368) |
| at | | | domain | | GCAGCCTACGCATGAATAGGTTGGC | (SEQ ID NO: 5369) |
| | | | containing 4 | | GCATGAATAGGTTGGCAGGTGTGGG | (SEQ ID NO: 5370) |
| | | | | | AGCCTGCTGCAATCCGTGGAAGAGC | (SEQ ID NO: 5371) |
| | | | | | GCTGCAATCCGTGGAAGAGCCCATG | (SEQ ID NO: 5372) |
| | | | | | GCAATCCGTGGAAGAGCCCATGGTG | (SEQ ID NO: 5373) |
| | | | | | TCCGTGGAAGAGCCCATGGTGCACC | (SEQ ID NO: 5374) |
| | | | | | CCATGTCCCTCTCAGCAGACAAGTT | (SEQ ID NO: 5375) |
| | | | | | ATGTCCCTCTCAGCAGACAAGTTCC | (SEQ ID NO: 5376) |
| | | | | | TCCCTCTCAGCAGACAAGTTCCAGG | (SEQ ID NO: 5377) |
| | | | | | CCTCTCAGCAGACAAGTTCCAGGTC | (SEQ ID NO: 5378) |

All gene probe set identification numbers and Entrez Gene identification numbers of Table 2 are hereby incorporated by reference in their entirety

[0054] In accordance with this aspect of the present invention, a good disease prognosis expression profile consists of genes, from the collection of 101 genes informative of colon cancer disease outcome, having expression levels that are below that of an average tumor sample expression level that are selected from the group consisting of ACTN1, ADORA1, ARHGAP8, LOC553158, BEX4, C1orf95, C3orf63, CAMSAP1L1, CD59, CNPY2, DBN1, FAM48A, FLJ10357, GPATCH4, GRB10, GREM2, HDAC5, HOXA4, ITM2B, KLC1, KLF12, KLHL3, NPR3, PAM, PBX2, PDLIM4, PIR, RGL2, RHBDF1, RP5-1077B9.4, RTN2, SCD5, SHANK2, SVIL, TAPBP, TIPIN, TM4SF1, TMEM204, TNS1, TUSC3 and ZBTB20. A good disease expression profile further consists of genes having expression levels that are above the average tumor sample expression level that are selected from the group consisting of NARS, WDR1, WARS, CCT4, ATP5B, SORD, UBE2L6, PSME2, AIP, RRM2, LRRC41, CCT2, TAF9, CCNB2, RFC5, IDE, MAD2L1, PSMA4, NDUFC1, IVD, PPIH, NEO1, CXCL10, FXN, GABBR1, COMMD4, DFFB, GLMN, CASP7, ATP5G3, DDOST, CYB561, NR2F1, WDR68, CXCL2, CASP1, INDO, PFKM, CXCL11, MCAM, MAP2K5, MRPS11, NOLC1, EMP1, GMDS, RPLP0, RPLP0-like, PREB, CMPK1, LAP3, FAM82C, AACS, NUP37, PBK, ALG6, FLJ13236, RPL22, C15orf44, USP3 and CALML4.

[0055] Also in accordance with this aspect of the present invention, a bad disease prognosis expression profile consists of genes from the collection of 101 genes informative of colon cancer disease outcome, having expression levels below that of an average tumor sample expression level that are selected from the group consisting of NARS, WDR1, WARS, CCT4, ATP5B, SORD, UBE2L6, PSME2, AIP, RRM2, LRRC41, CCT2, TAF9, CCNB2, RFC5, IDE, MAD2L1, PSMA4, NDUFC1, IVD, PPIH, NEO1, CXCL10, FXN, GABBR1, COMMD4, DFFB, GLMN, CASP7, ATP5G3, DDOST, CYB561, NR2F1, WDR68, CXCL2, CASP1, INDO, PFKM, CXCL11, MCAM, MAP2K5, MRPS11, NOLC1, EMP1, GMDS, RPLP0, RPLP0-like, PREB, CMPK1, LAP3, FAM82C, AACS, NUP37, PBK, ALG6, FLJ13236, RPL22, C15orf44, USP3 and CALML4. A bad disease expression profile further consists of genes having expression levels that are above the average tumor sample expression level that are selected from the group consisting of ACTN1, ADORA1, ARHGAP8, LOC553158, BEX4, C1orf9S, C3orf63, CAMSAP1L1, CD59, CNPY2, DBN1, FAM48A, FLJ10357, GPATCH4, GRB10, GREM2, HDAC5, HOXA4, ITM2B, KLC1, KLF12, KLHL3, NPR3, PAM, PBX2, PDLIM4, PIR, RGL2, RHBDF1, RP5-1077B9.4, RTN2, SCD5, SHANK2, SVIL, TAPBP, TIPIN, TM4SF1, TMEM204, TNS1, TUSC3 and ZBTB20.

[0056] Determining the prognosis of a subject having colon cancer using the gene expression data of the present invention, involves calculating the percentage of genes analyzed having expression levels associated with a good disease prognosis expression profile and the percentage of genes analyzed having expression levels associated with a bad disease prognosis expression profile in the sample from the subject. A favorable prognosis for the subject exists when greater than 20%, more preferably, greater than 25%, and most preferably, greater than 30% of the genes analyzed have expression levels associated with a good disease prognosis expression profile and less than 30%, more preferably, less than 25%, and most preferably, less than 20% of the genes analyzed have expression levels associated with a bad disease prognosis expression profile. An unfavorable prognosis for the subject exists when greater than 20%, more preferably, greater than 25%, and most preferably, greater than 30% of the genes analyzed have expression levels associated with a bad disease prognosis expression profile and less than 30%, more preferably, less than 25%, and most preferably, less than 20% of the genes analyzed have expression levels associated with a good disease prognosis expression profile.

[0057] A biological sample obtained from the subject having colon cancer in accordance with the methods of the present invention can be any biological tissue, fluid, or cell sample. Typical biological samples include, but are not limited to, sputum, blood, blood cells (e.g., white cells), tissue or fine needle biopsy samples, urine, stool, peritoneal fluid, and pleural fluid, or cells therefrom. Biological samples may also include sections of tissues such as frozen sections taken for histological purposes. In a preferred embodiment of the present invention, the biological sample obtained from the subject having colon cancer is a population of primary colon cancer cells. The colon cancer cells can be derived from a stage I, II, III, or IV colon cancer tumor.

[0058] Methods of isolating RNA and protein from biological samples for use in the methods of the present invention are readily known in the art. Protein preparation can be carried out using any method that produces analyzable protein. For example, the sample cells or tissue can be lysed in a protein lysis buffer (e.g. 50 mM Tris-HCl (pH, 6.8), 100 mM DTT, 100 μg/ml PMSF, 2% SDS, 10% glycerol, 1 μg/ml each of pepstatin A, leupeptin, and aprotinin, and 1 mM sodium orthovanadate) and sheared with a 22-gauge needle. Other methods of protein isolation that are suitable for use in carrying out the methods of the present invention are fully described in DENNISON C., A GUIDE TO PROTEIN ISOLATION (Kluwer Academic Publishers 2003), which is hereby incorporated by reference in its entirety. The protein content of the samples can be estimated using the Lowry, Bradford, or bicinchoninic acid assays or any commercially available assay based on the aforementioned techniques.

[0059] Methods of isolation and purification of nucleic acids suitable for use in carrying out the methods of the present invention are described in detail in LABORATORY TECHNIQUES IN BIOCHEMISTRY AND MOLECULAR BIOLOGY: HYBRIDIZATION WITH NUCLEIC ACID PROBES, PART I. THEORY AND NUCLEIC ACID PREPARATION (P. Tijssen ed., Elsevier 1993) which is incorporated herein by reference. Total RNA can be isolated from a given sample using, for example, an acid guanidinium-phenol-chloroform extraction, a guanidinium isothiocyanate-ultracentrifugation method, or a lithium chloride-SDS-urea method. PolyA⁺ mRNA can be isolated using oligo(dT) column chromatography or (dT)n magnetic beads (See e.g., SAMBROOK AND RUSSELL, MOLECULAR CLONING: A LABORATORY MANUAL (Cold Springs Laboratory Press, 1989) or CURRENT PROTOCOLS IN MOLECULAR BIOLOGY (Fred M. Ausubel et al. eds., 1992) which are hereby incorporated by reference in their entirety). See also WO/2000024939 to Dong et al. which is hereby incorporated by reference in its entirety, for complexity management and other nucleic acid sample preparation techniques.

[0060] It may be desirable to amplify the nucleic acid sample prior to detecting gene expression. One of skill in the art will appreciate that a method which maintains or controls for the relative frequencies of the amplified nucleic acids to achieve quantitative amplification should be used.

[0061] Typically, methods for amplifying nucleic acids employ a polymerase chain reaction (PCR) (See e.g., PCR TECHNOLOGY: PRINCIPLES AND APPLICATIONS FOR DNA AMPLIFICATION (Henry Erlich ed., Freeman Press 1992); PCR PROTOCOLS: A GUIDE TO METHODS AND APPLICATIONS (Michael Innis ed., Academic Press 1990); Mattila et al., “Fidelity of DNA Synthesis by the Thermococcus litoralis DNA Polymerase—An Extremely Heat Stable Enzyme with Proofreading Activity,” Nucleic Acids Res. 19:4967-73 (1991); Eckert et al., “DNA polymerase fidelity and the polymerase chain reaction,” PCR Methods and Applications 1:17-24 (1991); and U.S. Pat. Nos. 4,683,202, 4,683,195, 4,800,159 4,965,188, and 5,333,675, all to Mullis et al., which are hereby incorporated by reference in their entireties for all purposes. The sample can also be amplified on an array as described in U.S. Pat. No. 6,300,070 to Boles, which is incorporated herein by reference.

[0062] Other suitable amplification methods include the ligase chain reaction (LCR) (e.g., Wu et al., “The Ligation Amplification Reaction (LAR)—Amplification of Specific DNA Sequences Using Sequential Rounds of Template-Dependent Ligation,” Genomics 4:560-9 (1989), Landegren et al., “A Ligase-Mediated Gene Detection Technique,” Science 24-1:1077-80 (1988) and Barringer et al., “Blunt-End and Single-Strand Ligations by Escherichia coli Ligase: Influence on an In Vitro Amplification Scheme,” Gene 89:117-22 (1990), which are hereby incorporated by reference in their entirety); transcription amplification (Kwoh et al., “Transcription-Based Amplification System and Detection of Amplified Human Immunodeficiency Virus Type 1 with a Bead-Based Sandwich Hybridization Format,” Proc. Natl. Acad. Sci. USA 86:1173-7 (1989) and WO88/10315 to Gingeras, which are hereby incorporated by reference in their entirety); self-sustained sequence replication (Guatelli et al., “Isothermal, In Vitro Amplification of Nucleic Acids by a Multienzyme Reaction Modeled After Retroviral Replication,” Proc. Nat. Acad. Sci. USA 87:1874-8 (1990) and WO90/06995 to Gingeras, which are hereby incorporated by reference in their entirety); selective amplification of target polynucleotide sequences (U.S. Pat. No. 6,410,276 to Burg et al, which is hereby incorporated by reference in its entirety); consensus sequence primed polymerase chain reaction (CP-PCR) (U.S. Pat. No. 5,437,975 to McClelland, which is hereby incorporated by reference in its entirety); arbitrarily primed polymerase chain reaction (AP-PCR) (U.S. Pat. Nos. 5,413,909 to Bassam, and 5,861,245 to McClelland which are hereby incorporated by reference in their entirety); and nucleic acid based sequence amplification (NABSA) (See U.S. Pat. Nos. 5,409,818, 5,554,517, and 6,063,603 all to Davey, which are hereby incorporated by reference in their entirety). Other amplification methods that may be used are described in U.S. Pat. Nos. 5,242,794 to Whiteley; 5,494,810 to Barany; and 4,988,617 to Landegren, which are hereby incorporated by reference in their entirety.

[0063] As described herein, detecting the “expression level” of a gene can be achieved by measuring any suitable value that is representative of the gene expression level. The measurement of gene expression levels can be direct or indirect. A direct measurement involves measuring the level or quantity of RNA or protein. An indirect measurement may involve measuring the level or quantity of cDNA, amplified RNA, DNA, or protein; the activity level of RNA or protein; or the level or activity of other molecules (e.g., a metabolite) that are indicative of the foregoing. The measurement of expression can be a measurement of the absolute quantity of a gene product. The measurement can also be a value representative of the absolute quantity, a normalized value (e.g., a quantity of gene product normalized against the quantity of a reference gene product), an averaged value (e.g., average quantity obtained at different time points or from different tumor cell samples from a subject, or average quantity obtained using different probes, etc.), or a combination thereof.

[0064] When it is desirable to measure the expression level of a gene by measuring the level of protein expression, any protein hybridization or immunodetection based assay known in the art can be used. In a protein hybridization based assay, an antibody or other agent that selectively binds to a protein is used to detect the amount of that protein expressed in a sample. For example, the level of expression of a protein can be measured using methods that include, but are not limited to, western blot, immunoprecipitation, enzyme-linked immunosorbent assay (ELISA), radioimmunoassay (RIA), fluorescent activated cell sorting (FACS), immunohistochemistry, immunocytochemistry, or any combination thereof. Also, antibodies, aptamers, or other ligands that specifically bind to a protein can be affixed to so-called “protein chips” (protein microarrays) and used to measure the level of expression of a protein in a sample. Alternatively, assessing the level of protein expression can involve analyzing one or more proteins by two-dimensional gel electrophoresis, mass spectroscopy (MS), matrix-assisted laser desorption/ionization-time of flight-MS (MALDI-TOF), surface-enhanced laser desorption ionization-time of flight (SELDI-TOF), high performance liquid chromatography (HPLC), fast protein liquid chromatography (FPLC), multidimensional liquid chromatography (LC) followed by tandem mass spectrometry (MS/MS), protein chip expression analysis, gene chip expression analysis, and laser densitometry, or any combinations of these techniques.

[0065] Measuring gene expression by quantifying mRNA expression can be achieved using any commonly used method known in the art including northern blotting and in situ hybridization (Parker et al., “mRNA: Detection by in Situ and Northern Hybridization,” Methods in Molecular Biology 106:247-283 (1999), which is hereby incorporated by reference in its entirety); RNAse protection assay (Hod et al., “A Simplified Ribonuclease Protection Assay,” Biotechniques 13:852-854 (1992), which is hereby incorporated by reference in its entirety); reverse transcription polymerase chain reaction (RT-PCR) (Weis et al., “Detection of Rare mRNAs via Quantitative RT-PCR,” Trends in Genetics 8:263-264 (1992), which is hereby incorporated by reference in its entirety); and serial analysis of gene expression (SAGE) (Velculescu et al., “Serial Analysis of Gene Expression,” Science 270:484-487 (1995); and Velculescu et al., “Characterization of the Yeast Transcriptome,” Cell 88:243-51 (1997), which is hereby incorporated by reference in its entirety). Alternatively, antibodies may be employed that recognize specific duplexes, including DNA duplexes, RNA duplexes, and DNA-RNA hybrid duplexes or DNA-protein duplexes.

[0066] In a preferred embodiment of the present invention, mRNA expression is measured using a nucleic acid amplification assay that is a semi-quantitative or quantitative real-time polymerase chain reaction (RT-PCR) assay. Because RNA cannot serve as a template for PCR, the first step in gene expression profiling by RT-PCR is the reverse transcription of the RNA template into cDNA, followed by its exponential amplification in a PCR reaction. The two most commonly used reverse transcriptases are avilo myeloblastosis virus reverse transcriptase (AMV-RT) and Moloney murine leukemia virus reverse transcriptase (MLV-RT), although others are also known and suitable for this purpose. The reverse transcription step is typically primed using specific primers, random hexamers, or oligo-dT primers, depending on the circumstances and the goal of expression profiling. For example, extracted RNA can be reverse-transcribed using a GeneAmp RNA PCR kit (Perkin Elmer, Calif., USA), following the manufacturer's instructions. The derived cDNA can then be used as a template in the subsequent PCR reaction.

[0067] Although the PCR step can use a variety of thermostable DNA-dependent DNA polymerases, it typically employs the Taq DNA polymerase, which has a 5′-3′ nuclease activity but lacks a 3′-5′ proofreading endonuclease activity. An exemplary PCR amplification system using Taq polymerase is TaqMan® PCR (Applied Biosystems, Foster City, Calif.). Taqman® PCR typically utilizes the 5′-nuclease activity of Taq or Tth polymerase to hydrolyze a hybridization probe bound to its target amplicon, but any enzyme with equivalent 5′ nuclease activity can be used. Two oligonucleotide primers are used to generate an amplicon typical of a PCR reaction. A third oligonucleotide, or probe, is designed to detect the nucleotide sequence located between the two PCR primers. The probe is non-extendible by Taq DNA polymerase enzyme, and is labeled with a reporter fluorescent dye and a quencher fluorescent dye. Any laser-induced emission from the reporter dye is quenched by the quenching dye when the two dyes are located close together as they are on the probe. During the amplification reaction, the Taq DNA polymerase enzyme cleaves the probe in a template-dependent manner. The resultant probe fragments disassociate in solution, and signal from the released reporter dye is free from the quenching effect of the second fluorophore. One molecule of reporter dye is liberated for each new molecule synthesized, and detection of the unquenched reporter dye provides the basis for quantitative interpretation of the data.

[0068] TaqMan® RT-PCR can be performed using commercially available equipment, such as, for example, the ABI PRISM 7700® Sequence Detection System®(Perkin-Elmer-Applied Biosystems, Foster City, Calif., USA), or the Lightcycler (Roche Molecular Biochemicals, Mannheim, Germany).

[0069] In addition to the TaqMan primer/probe system, other quantitative methods and reagents for real-time PCR detection that are known in the art (e.g. SYBR green, Molecular Beacons, Scorpion Probes, etc.) are suitable for use in the methods of the present invention.

[0070] To minimize errors and the effect of sample-to-sample variation, RT-PCR is usually performed using an internal standard. The ideal internal standard is expressed at a constant level among different tissues, and is unaffected by colon cancer. RNAs most frequently used to normalize patterns of gene expression are mRNAs for the housekeeping genes glyceraldehyde-3-phosphate-dehydrogenase (GAPDH) and β-actin.

[0071] Real time PCR is compatible both with quantitative competitive PCR, where internal competitor for each target sequence is used for normalization and quantitative comparative PCR using a normalization gene contained within the sample, or a housekeeping gene for RT-PCR. For further details see, e.g., Heid et al., “Real Time Quantitative PCR,” Genome Research 6:986-994 (1996), which is incorporated by reference in its entirety.

[0072] In a preferred embodiment of the present invention, the expression levels of genes informative of colon cancer prognosis are detected using an array-based technique. These arrays, also commonly referred to as “microarrays” or “chips” have been generally described in the art, see e.g., U.S. Pat. Nos. 5,143,854 to Pirrung et al.; 5,445,934 to Fodor et al.; 5,744,305 to Fodor et al.; 5,677,195 to Winkler et al.; 6,040,193 to Winkler et al.; 5,424,186 to Fodor et al., which are all hereby incorporated by reference in their entirety. A microarray comprises an assembly of distinct polynucleotide or oligonucleotide probes immobilized at defined positions on a substrate. Arrays are formed on substrates fabricated with materials such as paper, glass, plastic (e.g., polypropylene, nylon), polyacrylamide, nitrocellulose, silicon, optical fiber or any other suitable solid or semi-solid support, and configured in a planar (e.g., glass plates, silicon chips) or three-dimensional (e.g., pins, fibers, beads, particles, microtiter wells, capillaries) configuration. Probes forming the arrays may be attached to the substrate by any number of ways including (i) in situ synthesis (e.g., high-density oligonucleotide arrays) using photolithographic techniques (see Fodor et al., “Light-Directed, Spatially Addressable Parallel Chemical Synthesis,” Science 251:767-773 (1991); Pease et al., “Light-Generated Oligonucleotide Arrays for Rapid DNA Sequence Analysis,” Proc. Natl. Acad. Sci. U.S.A. 91:5022-5026 (1994); Lockhart et al., “Expression Monitoring by Hybridization to High-Density Oligonucleotide Arrays,” Nature Biotechnology 14:1675 (1996); and U.S. Pat. Nos. 5,578,832 to Trulson; 5,556,752 to Lockhart; and 5,510,270 to Fodor, which are hereby incorporated by reference in their entirety); (ii) spotting/printing at medium to low-density (e.g., cDNA probes) on glass, nylon or nitrocellulose (Schena et al., “Quantitative Monitoring of Gene Expression Patterns with a Complementary DNA Microarray,” Science 270:467-470 (1995), DeRisi et al, “Use of a cDNA Microarray to Analyse Gene Expression Patterns in Human Cancer,” Nature Genetics 14:457-460 (1996); Shalon et al., “A DNA Microarray System for Analyzing Complex DNA Samples Using Two-Color Fluorescent Probe Hybridization,” Genome Res. 6:639-645 (1996); and Schena et al., “Proc. Natl. Acad. Sci. U.S.A. 93:10539-11286) (1995), which are hereby incorporated by reference in their entirety); (iii) masking (Maskos et al., “Oligonucleotide Hybridizations on Glass Supports: A Novel Linker for Oligonucleotide Synthesis and Hybridization Properties of Oligonucleotides Synthesised In Situ,” Nuc. Acids. Res. 20:1679-1684 (1992), which is hereby incorporated by reference in its entirety); and (iv) dot-blotting on a nylon or nitrocellulose hybridization membrane (see e.g., SAMBROOK AND RUSSELL, MOLECULAR CLONING: A LABORATORY MANUAL (Cold Springs Laboratory Press, 1989), which is hereby incorporated by reference in its entirety). Probes may also be noncovalently immobilized on the substrate by hybridization to anchors, by means of magnetic beads, or in a fluid phase such as in microtiter wells or capillaries. The probe molecules are generally nucleic acids such as DNA, RNA, PNA, and cDNA but may also include proteins, polypeptides, oligosaccharides, cells, tissues and any permutations thereof which can specifically bind the target molecules.

[0073] Fluorescently labeled cDNA for hybridization to the array may be generated through incorporation of fluorescent nucleotides by reverse transcription of RNA extracted from colon cancer tumor tissue of interest. Labeled cDNA applied to the array hybridizes with specificity to each nucleic acid probe spotted on the array. After stringent washing to remove non-specifically bound cDNA, the array is scanned by confocal laser microscopy or by another detection method, such as a CCD camera. Quantitation of hybridization of each arrayed element allows for assessment of corresponding mRNA abundance. With dual color fluorescence, separately labeled cDNA samples generated from two sources of RNA are hybridized pairwise to the array. The relative abundance of the transcripts from the two sources corresponding to each specified gene is thus determined simultaneously. The miniaturized scale of the hybridization affords a convenient and rapid evaluation of the expression pattern for large numbers of genes. Such methods have been shown to have the sensitivity required to detect rare transcripts, which are expressed at a few copies per cell, and to reproducibly detect at least approximately two-fold differences in the expression levels (Schena et al., “Parallel Human Genome Analysis: Microarray-Based Expression Monitoring of 1000 Genes,” “Proc. Natl. Acad. Sci. USA 93(20):10614-9 (1996), which is hereby incorporated by reference in its entirety).

[0074] When the use of microarray technology is desired, the expression levels of genes informative of colon cancer prognosis can be detected using commercially available arrays comprising nucleic acid probes, where at least five of the nucleic acid probes are complementary at least a portion of a nucleotide sequence (i.e., an RNA transcript or DNA nucleotide sequence) of a gene in the group of 176, 71, or 101 genes informative of colon cancer prognosis disclosed supra. As described herein, the expression levels of genes informative of colon cancer progression can be detected using the Affymetrix U133 gene expression arrays following the manufacturer's protocols. In a preferred embodiment of the present invention, however, the microarray comprises a plurality of nucleic acid probes, each nucleic acid probe having a nucleotide sequence that is complementary to at least a portion of a nucleotide sequence (RNA or DNA) of a gene selected from the group of 176 genes informative of colon cancer outcome disclosed supra. In another embodiment, the microarray comprises a plurality of nucleic acid probes, each nucleic acid probe having a nucleotide sequence that is complementary to at least a portion of a nucleotide sequence (RNA or DNA) of a gene selected from the group of 71 genes informative of colon cancer outcome described supra. In accordance with this aspect of the present invention, the nucleic acid probes of the present invention have a nucleotide sequence that is complementary to at least a portion of an RNA transcript or DNA nucleotide sequence encoded by a gene informative of colon cancer outcome. Exemplary nucleic acid probes having nucleotide sequences complementary to the RNA transcripts encoded by the 176 genes and the 71 genes informative of colon cancer outcome are provided in Table 1 by their Affymetrix identifier.

[0075] In another embodiment of the present invention, the microarray comprises a plurality of nucleic acid probes, each nucleic acid probe having a nucleotide sequence that is complementary to at least a portion of a nucleotide sequence (i.e., RNA transcript or DNA nucleotide sequence) of a gene selected from the group of 101 genes informative of colon cancer outcome disclosed supra. Exemplary nucleic acid probes having nucleotide sequences complementary to the RNA transcripts encoding the 101 genes informative of colon cancer outcome are provided in Table 2 by their Affymetrix identifier.

[0076] In another embodiment of the present invention, one or more supplementary analyses is performed to supplement or confirm the prognosis prediction achieved with the gene expression level analysis. In accordance with this embodiment of the present invention, the one or more additional analyses includes detecting microsatellite instability, measuring DNA promoter methylation, screening one or more mutations in one or more colon cancer oncogenes or tumor suppressor genes in the sample, or any combination of these analyses. The prognosis of a subject having colon cancer is then based on the detected expression levels of genes known to be informative of colon cancer in combination with one or more of these independent, additional analysis.

[0077] A deficient DNA mismatch repair (MMR) system is observed in about 10-15% of all colorectal carcinomas and in up to 90% of hereditary non-polyposis colorectal cancer (HNPCC) patients. Tumors with MMR defects acquire mutations in short repetitive DNA stretches, a phenomenon termed microsatellite instability. Therefore, the determination of microsatellite status is an ideal independent confirmatory prognostic analysis to perform in accordance with the methods of the present invention. Additionally, because the efficacy of adjuvant chemotherapy can be dependent on the microsatellite status of the tumor, determining the microsatellite status can be particular relevant to determining an effective individualized treatment plan for a subject having colorectal cancer.

[0078] In accordance with this aspect of the present invention, a favorable prognosis exists when a microsatellite instability-low status is detected, whereas an unfavorable prognosis exists when a microsatellite instability-high status is detected.

[0079] Methods and techniques for detecting microsatellite instability in a sample are well known in the art and are suitable for use in accordance with this aspect of the invention. In a preferred embodiment, microsatellite instability detection is performed using a PCR-based method to amplify tumor DNA and detect the five microsatellite markers established by the National Cancer Institute (Boland et al., “A National Cancer Institute Workshop of Microsatellite Instability for Cancer Detection and Familial Predisposition: Development of International Criteria for the Determination of Microsatellite Instability in Colorectal Cancer,” Cancer Res. 58(22):5248-57 (1998), which is hereby incorporated by reference in its entirety). These five microsatellite markers include two mononucleotide repeats (BAT26 and BAT25) and three dinucleotide repeats (D2S123, D5S346, and D17S250). The multiplex assay for rapid and accurate detection of the NCI 5-marker panel described by Nash et al., “Automated, Multiplex Assay for High-Frequency Microsatellite Instability in Colorectal Cancer,” J. Clin. Oncol. 21:3105-12 (2003), which is hereby incorporated by reference in its entirety, is particularly well suited for use in accordance with this aspect of the present invention. Alternatively, a PCR-based method for assessing the microsatellite instability status of a sample can be employed (e.g. detection of the 3′ UTR mononucleotide repeat, T25 (CAT25), of the CASP2 gene as described in U.S. Patent Application Publication No. 20080096197 to Findeisen et al., which is hereby incorporated by reference in its entirety).

[0080] Immunohistochemical approaches for detecting microsatellite instability are also suitable for use in accordance with this aspect of the present invention. Monoclonal antibodies specific for DNA mismatch repair genes, for example MLH1, MSH2, MSH6, and PMS2 have been described by Marcus et al. “Immunohistochemistry for hMLH1 and hMSH2: A Practical Test for DNA Mismatch Repair-Deficient Tumors,” Am J Surg Pathol. 23(10):1248-55 (1999); Lindor et al. “Immunohistochemistry Versus Microsatellite Instability Testing in Phenotyping Colorectal Tumors,” J Clin Oncol. 20(4):897-9 (2002); and Umar et al. “Revised Bethesda Guidelines for Hereditary Nonpolyposis Colorectal Cancer (Lynch syndrome) and Microsatellite Instability,” J Natl Cancer Inst. 96 (4):261-8 (2004), which are hereby incorporated by reference in their entirety.

[0081] A second analysis that is suitable to complement the detection of gene expression levels involves measuring the level of DNA promoter methylation. In higher order eukaryotic organisms, DNA methylation occurs at cytosines located 5′ to guanosine in a CpG dinucleotide. This modification has important regulatory effects on gene expression predominantly when it involves CpG rich areas known as CpG islands that are located in the promoter region of a gene sequence. Extensive methylation of CpG islands in tumor-suppressor genes has been associated with reduced expression of the tumor suppressor gene, resulting in unchecked cellular growth, tissue invasion, angiogenesis, and metastases. For example, the aberrant methylation of the Mut L homologue 1 gene (hMLH1) resulting in defective DNA mismatch repair has been associated with colorectal cancer. In accordance with this aspect of the invention, hMLH1 promoter methylation can be measured to compliment or confirm the gene expression detection analysis. Other genes known to be hypermethylated in colon cancer which are also suitable for promoter methylation analysis in accordance with this aspect of the invention include HPP1 (Sato et al., “Aberrent Methylation of the HPP1 Gene in Ulcerative Colitis-Associated Colorectal Carcinoma,” Cancer Research 62:6820-22 (2002), which is hereby incorporated by reference in its entirety); Reprimo (Takahashi et al., “Aberrent Methylation of Reprimo in Human Malignancies,” Int J Cancer 115(4):503-10 (2005), which is hereby incorporated by reference in its entirety); NEURL and FOXL2 (Schuebel et al., “Comparing the DNA Hypermethylome with Gene Mutations in Human Colorectal Cancer,” PLOS Genet. 3(9):e157-(2007), which is hereby incorporated by reference in its entirety); and ADAMTS1, CRABP1, and NR3C1 (Lind et al., “ADAMTS1, CRABP1, and NR3C1 identified as Epigenetically Deregulated Genes in Colorectal Tumorigenesis,” Cell Oncology 28(5-6):259-72 (2006), which is hereby incorporated by reference in its entirety).

[0082] In a preferred embodiment of the present invention the methylation level of the lecithin:retinol acyl transferase (LRAT) gene promoter nucleotide sequence, or region upstream thereof, is measured (See U.S. Patent Application Publication No. US20050227265 to Barany et al. and WO2008/077095 to Barany et al., which are hereby incorporated by reference in their entirety). In accordance with this aspect of the invention, a favorable prognosis exists when an increase in the methylation level of the lecithin:retinol acyl transferase gene promoter nucleotide sequence, or region upstream thereof, is measured.

[0083] DNA promoter methylation can be measured at a genome-wide or gene-specific level. For global methylation analysis, chromatographic methods, such as reverse-phase high pressure liquid chromatography and methyl accepting capacity assays are generally used. Alternatively, the restriction landmark genomic scanning for methylation (RLGS-M) assay as described by Hayashizaki et al., “Restriction Landmark Genomic Scanning Method and its Various Applications,” Electrophoresis 14(4):251-8 (1993) and CpG island microarry can also be used to measure genome-wide methylation. Various techniques available to measure gene-specific methylation, include DNA digestion with a methylation sensitive restriction enzyme followed by Southern blot detection of PCR amplification; methylation specific PCR; bisulfite genomic sequencing PCR; or in situ immunodetection using 5-methylcytosine specific antibody as described by Castilho et al., “5-Methylcytosine Distribution and Genome Organization in Triticale Before and After Treatment with 5-Azacytidine,” J Cell Sci 112:4397-404 (1999), which is hereby incorporated by reference in its entirety). Additional methods and techniques for measuring DNA methylation including the nearest neighbor analysis, chemical DNA sequencing, methylation sensitive restriction fingerprinting, combined bisulfite restriction analysis, and methyl-CpG binding column isolation are described in DNA Methylation Protocols (Mills and Ramsahoye, eds., Humana Press 2002), which is hereby incorporated by reference in its entirety. In a preferred embodiment, DNA promoter methylation analysis is carried out using the quantitative bisulfite-PCR/LDR/Universal Array platform described in U.S. Patent Application Publication No. US20050227265 to Barany et al.; WO2008/077095 to Barany et al.; and Chen et al., “Multiplexed Profiling of Candidate Genes for CpG Island Methylation Status using a Flexible PCR/LDR/Universal Array Assay,” Genome Research 16:282-9 (2006) which are incorporated by reference in their entirety.

[0084] In another embodiment of the present invention, the mutational status of one or more colon cancer oncogenes or tumor-suppressor genes is screened. The presence or absence of such mutations can contribute to the determination of a subject's prognosis. Mutations in several such genes, especially DNA mismatch repair genes, are well known in the art and can be screened in accordance with this aspect of the invention. In a preferred embodiment, the mutational status of K-ras, B-raf, APC, p53, PIK3CA, is screened. An unfavorable prognosis exists when mutations in one or more of these colon cancer oncogenes or tumor suppressor genes is identified.

[0085] Any art acceptable method for detecting the mutational status of a gene can be used in accordance with this aspect of the invention. Preferred methods include the endonuclease/ligase based mutation scanning method (Huang et al., “An Endonuclease/Ligase Based Mutation Scanning Method Especially Suited for Analysis of Neoplastic Tissue,” Oncogene 21:1909-21 (2002) and U.S. Pat. No. 7,198,894 to Barany et al., which are hereby incorporated by reference in their entirety); ligase detection reaction (LDR) (U.S. Pat. No. 6,312,892 to Barany et al., which is hereby incorporated by reference in their entirety); coupled LDR/PCR (U.S. Pat. Nos. 7,097,980, 6,797,470, 6,268,148, and 6,027,889 all to Barany et al., which are hereby incorporated by reference in their entirety); coupled PCR/restriction endonuclease digestion/LDR reaction (U.S. Pat. No. 7,014,994 to Barany et al., which is hereby incorporated by reference in its entirety); ligase detection reactions using addressable arrays (U.S. Pat. No. 7,083,917 to Barany and U.S. Patent Application Publication Nos. 20020150921, 20030022182, 20040259141, and 20040253625 all to Barany et al., which are hereby incorporated by reference in their entirety) and DNA microarray multiplex detection methods (Gerry et al., “Universal DNA Microarray Method for Multiplex Detection of Low Abundant DNA Mutations,” J Mol Biol 292:251-62 (1999), which is hereby incorporated by reference in its entirety). Other suitable methods for determining the mutational status of a gene include direct DNA sequencing techniques, (e.g. Sanger dideoxy or Maxam-Gilbert sequencing reactions) and massively parallel sequencing technology.

[0086] In a preferred embodiment of the present invention, the data generated from the detection of gene expression levels of the at least five genes selected from the group of 176, 71, or 101 genes informative of colon cancer prognosis is used to prepare a personalized genomic profile for a colon cancer patient. Information regarding microsatellite instability, DNA promoter methylation, and the mutational status of one or more oncogenes or tumor-suppressor genes can also be incorporated into an individual's personalized genomic profile. The genomic profile can be used to establish a personalized treatment plan for the colon cancer patient. Such treatment plan may consist of surgery, individual therapy, chemotherapy, radiation therapy or any combination thereof. In accordance with this aspect of the invention, the colon cancer patient is administered a cancer treatment based on the treatment plan.

[0087] FIG. 3 summarizes how a colon cancer patient's prognosis is determined using the 71, 101, or 176 gene predictor sets of the present invention. The left side of the figure outlines the steps involved in identifying genes predictive of colon cancer outcome generally, while the right side of the figure outlines the method of determining the prognosis of a subject having colon cancer of the present invention using three hypothetical patient samples where the expression of six genes is analyzed. First, the gene expression levels of at least five, but preferably all of the 71, 101, or 176 genes in a tumor sample obtained from the patient are determined and compared to average tumor sample expression levels. If gene expression for a particular gene is in the upper third of average tumor expression level in the patient sample and higher expression of that gene is associated with a bad disease expression profile, the patient is given a negative mark or negative score (see FIG. 3A). If, however, higher gene expression is associated with a good disease outcome, the patient is given a positive mark or score. As shown in the hypothetical example (FIG. 3B), the expression levels for genes A-F were assessed in samples 1-3. In sample 1, Genes A and C had expression values in the lower third of average tumor expression levels (see FIG. 3B, Table A, compare values in column 5 with values in column 2). Low expression of Genes A and C are associated with a good outcome (see FIG. 3B, Table A, column 4). Accordingly, sample 1 was given positive scores for these genes as indicated by the blue shading. Also in sample 1, Genes B and F had expression levels in the top third of average tumor expression levels. High expression of Gene B is associated with a bad outcome (sample 1 given negative score indicated by red shading), while high expression of Gene F is associated with a good outcome (blue shading). In total for sample 1, the expression levels of three genes was associated with a good disease outcome (i.e. Genes A, C, and F, FIG. 3B, Table B) resulting in a positive score of 3, while the expression level of one gene was associated with a bad disease outcome (i.e. Gene B) resulting in a negative score of 1 (genes E and F had neutral scores).

[0088] The negative and positive scores are converted to percentages based on the total number of genes analyzed. In the hypothetical example, sample 1 had 3 out of 6 genes, or 50%, with favorable or positive expression levels, and 1 out of 6 genes, or 17% with unfavorable or negative expression levels (FIG. 3B, Table C). The predicted outcome for the patient is determined by plotting the percentage of genes in the tumor sample that had expression values associated with a good disease outcome (y-axis) versus the percentage of genes in the tumor sample having expression levels associated with a bad disease outcome (x-axis) where the point of origin is set to 30%. In the hypothetical example, sample 1, with 50% of genes having expression levels associated with a good outcome and 17% of genes having expression levels associated with bad outcome falls into Group 2A, where the prognosis is generally favorable (FIG. 4B, scatterplot). Sample 2, with 17% of the genes having expression levels associated with a good outcome and 50% of the genes having expression levels associated with bad outcome falls into Group 4, where the prognosis is generally unfavorable. Sample 3, having 33% of the gene analyzed having expression levels associated a good outcome and 33% associated with a bad disease outcome binned to Group 3A, where the prognisis is generally inconclusive.

[0089] As indicated in FIG. 3A, supplementary analyses (i.e. LRAT methylation, MSI status, etc.) can be performed to provide additional prognostic information for patients that fall into intermediate groups (i.e. Groups 2 and 3) or to confirm the prognosis of those patients in Group 1.

[0090] As discussed supra, the predicted outcome for a patient, determined by gene expression levels as outlined above, can be used to guide treatment. For example, patients who bin to Group 1 have a favorable prognosis and may benefit from surgery only, whereas patients who bin to Group 4 have an unfavorable prognosis and may need to supplement surgery with chemotherapy or other more aggressive therapies. Treatment decisions should further take into consideration the stage of the tumor. For example, individuals with stage 2 tumors in Group 1 or 2A will most likely benefit from surgery without additional treatment. Individuals with stage 3 tumors in these groups are probably responsive to standard care. Individuals with stage 3 tumors in Groups 4 and 5 will most likely not be responsive to standard care, and thus would be candidates for enrolling into clinical trials of novel therapies.

[0091] The present invention is also directed to a method of identifying an agent that improves the prognosis of a subject having colon cancer. This method involves administering an agent (i.e., a candidate agent) to the subject having colon cancer and obtaining a first biological sample from the subject before said administering and a second biological sample from the subject after said administering. The method further involves detecting the expression level of at least five genes selected from the group of 176 genes informative of colon cancer prognosis disclosed supra. Determining increases or decreases in the expression levels of the at least five genes in the second sample compared to the first sample identifies an agent that improves the prognosis of a subject having colon cancer. In a preferred embodiment of this aspect of the present invention, the at least five genes is selected from the group of 71 genes informative of colon cancer prognosis disclosed supra.

[0092] In accordance with this aspect of the present invention, an agent that increases the expression levels of any one of the following genes: SERPINA1, RPLP0, RPLP0-like, CYB561, AKR1A1, AP3D1, ARL6IP4, OGFOD2, ASNA1, CFB, ERP29, SMG7, CASP1, CCNA2, LOC100131861, SAMM50, COX5A, CXCL11, DAZAP2, DDX23, FDFT1, COMMD4, GCHFR, GRHPR, GSR, ISG20, ITGAE, KIAA0746, SERINC2, FRYL, LRRC47, LAMP3, R3HCC1, MAPKAPK5, MCM5, MCRS1, TMEM106C, MMP3, MTUS1, LRRC41, NAT1, NDUFC1, YBX1, PEBP1, PIGR, PSMA5, SFPQ, SLC25A3, SLC39A8, SQRDL, SRP72, SSNA1, TAPBPL, TEGT, PBK, UCP2, UQCRH, XPO7, CCT2, CNOT7, DHX15, TMEM87A, ELP3, FAM82C, LL22NC03-5H6.5, DENND2D, WDR68, IL15RA, DENND2A, KIF13B, MFHAS1, SPATA5L1, MYRIP, PIGT, PSMD9, RPS27L, TNFRSF10B, UBE2L6, USP3, ATP5B, CALML4, C1orf144, TMEM33, C12orf52, GHITM, H2AFZ, LAP3, MRPL46, SORD, CNPY2, TNFSF10, U2AF2, CMPK1, UQCRFS1, WARS and WDR1 is an agent that improves the prognosis of a subject having colon cancer. An agent that causes a decrease in the expression levels of any one of the following genes: AK023058*, AIP, ARL2BP, C1GALT1, CDC42BPA, C8orf70, CLN5, COBL, CYB5B, MOSPD1, DOCK9, EGFR, FKBP14, DND1, DND1, GREM2, GPR177, GALNS, GRB10, GRP, GSTA1, RP3-377H14.5, HOXB7, ZNF117, TNIK, LANCL1, METRN, LEPREL1, NAB1, NISCH, OGT, OSBPL3, PDGFA, PRDM2, PRELP, PSPC1, RECQL, RYK, SMURF2, TLN1, UNC84A, USP12, ZMYM2, ZMYM5, AL359599*, ARL4A, N4BP2L2, GLS, C19orf36, TMCC1, METTL3, TMEM16A; RTN2, SCAMP1, SF3B1, SOX4, STK3, ZNF430, C6orf15, C7orf10, CHST12, ETV1, ACSL4, FLJ10357, C5orf23, AA058828*, CDR2L, KLC1, MAP4, NUMB, PAM, PGDS, PTHLH, ZC3H7B, SAV1, SGCD, SYNGR1, TES, IFT88, TRIM36 and VPS41 is an agent that improves the prognosis of a subject having colon cancer.

[0093] Another aspect of the present invention is directed to a collection of 71 genes having expression levels informative for predicting a prognosis of a patient having colon cancer. This collection of 71 genes includes the following genes of Table 1: SLC25A3, DAZAP2, TEGT, ERP29, PSMA5, DDX23, LOC100131861, SAMM50, SFPQ, NISCH, CYB5B, TMEM106C, EGFR, MCRS1, SERPINA1, CCNA2, NDUFC1, COX5A, GCHFR, ITGAE, PRDM2, PDGFA, GSR, GRP, COMMD4, XPO7, YBX1, SRP72, UCP2, SLC39A8, NAB1, WDR68, CXCL11, RECQL, CASP1, PTHLH, UNC84A, MTUS1, KIAA0746, SERINC2, DOCK9, FRYL, MAPKAPK5, LRRC47, RQCD1, TNIK, RPLP0, RPLP0-like, CLN5, NAT1, CDC42BPA, GSTA1, ZMYM5, RYK, PIGT, CMPK1, SQRDL, FAM82C, CNOT7, LL22NC03-5H6.5, PSPC1, TAPBPL, METRN, PBK, MRPL46, FKBP14, C1GALT1, GREM2, GPR177, DND1, and PRELP. The collection of 71 genes informative of predicting the prognosis of a patient having colon cancer can further include the following genes of Table 1: AA058828*, ACSL4, AIP, AK023058*, AKR1A1, AL359599*, AP3D1, ARL2BP, ARL4A, ARL61P4, OGFOD2, ASNA1, ATP5B, C12orf52, C19orf36, C1orf144, C5orf23, C6orf15, C7orf10, C8orf70, CALML4, CCT2, CDR2L, CFB, CHST12, CNPY2, COBL, CYB561, DENND2A, DENND2D, DHX15, DND1, ELP3, ETV1, FDFT1, FLJ10357, GALNS, GHITM, GLS, GRB10, GRHPR, H2AFZ, HOXB7, IFT88, IL15RA, ISG20, KIAA0746, SERINC2, KIF13B, KLC1, LAMP3, LANCL1, LAP3, LEPREL1, LRRC41, MAP4, MCM5, METTL3, MFHAS1, MMP3, MOSPD1, MYRIP, N4BP2L2, NUMB, OGT, OOSBPL3, PAM, PEBP1, PGDS, PIGR, PSMD9, R3HCC1, RP3-377H14.5, RPS27L, RTN2, SAV1, SCAMP1, SF3B1, SGCD, SLC39A8, SMG7, SMURF2, SORD, SOX4, SPATA5L1, SSNA1, STK3, SYNGR1, TEGT, TES, TLN1, TMCC1, TMEM16A, TMEM33, TMEM87A, TNFRSF10B, TNFSF10, TRIM36, U2AF2, UBE2L6, UCP2, UQCRFS1, UQCRH, USP12, USP3, VPS41, WARS, WDR1, ZC3H7B, ZMYM2, ZNF117, and ZNF430.

[0094] Another aspect of the present invention is related to a collection of 101 genes having expression levels informative for predicting a prognosis of a patient having colon cancer. The collection of 101 genes are provided in Table 2 above.

[0095] Also included in the present invention are arrays that are useful for practicing one or more of the above described methods. Such arrays consist of nucleic acid or peptide-based probes that are useful for detecting the expression of one or more genes, preferably at least five genes, from the collection of 71, 101, or 176 genes that are informative for predicting the prognosis of a subject having colon cancer, using any of the methods described supra for detecting gene expression. A variety of different array formats are known in the art with a wide variety of probe structures, substrate compositions, and attachment technologies (See e.g. U.S. Pat. Nos. 5,143,854 to Pirrung et al.; 5,288,644 to Beavis et al.; 5,324,633 to Fodor et al.; 5,432,049 to Fischer et al.; 5,470,710 to Weiss et al.; 5,492,806 to Drmanac et al.; 5,445,934 to Fodor et al.; 5,744,305 to Fodor et al.; 5,677,195 to Winkler et al.; 6,040,193 to Winkler et al.; and 5,424,186 to Fodor et al., which are all hereby incorporated by reference in their entirety). In a preferred embodiment, array(s) of the present invention consist of a plurality of nucleic acid probes, each nucleic acid probe having a nucleotide sequence that is complementary to at least a portion of a nucleotide sequence (e.g., RNA or DNA) of a gene selected from the collection of 71 genes, 101 genes, 176 genes, or any combination thereof. Exemplary nucleic acid probes having nucleotide sequences complementary to at least a portion of the nucleotide sequences (i.e., RNA transcript) encoded by the genes of the 71, 101, and 176 gene collections are provided in Tables 1 and 2, although variations of those probes, or other probes may also be suitable for use.

[0096] In a preferred embodiment of the present invention the arrays of the present invention are available together with suitable reagents as a kit. The kit can be used to determine gene expression levels in biological sample(s) from a subject having colon cancer and determine his or her prognosis. Additional reagents suitable for inclusion in such kits include, but are not limited to, gene specific primers for the collections of the 71, 101, and/or 176 genes, universal primers, dNTPs and/or rNTPS, fluorescent, biotinylated, or other post-synthesis labeling reagents, enzymes such as reverse transcriptase, DNA and/or RNA polymerases, and various wash and buffer mediums.

[0097] Another aspect of the present invention relates to a method for determining a subject's predisposition to having colon cancer. This method involves obtaining a biological sample from the subject and detecting the expression levels of at least five gene selected from the collection of 176 genes informative of colon cancer predisposition disclosed supra. The method further involves comparing the detected expression levels of the at least five genes from said sample with the expression levels of the corresponding five genes associated with a having a predisposition to colon cancer and determining the subject's predisposition to having colon cancer based on said comparing.

### EXAMPLES

### Example 1

### Biological Sample Description and Collection

[0098] Expression array data was generated from 183 primary colon cancer (PCC) tumors, 46 large adenomas, 39 liver metastasis, 19 lung metastasis, 53 normal mucosa, 7 normal lung, and 12 normal liver tissues. In addition, SNP array data was collected from 89 colorectal (CRC) tissue samples (65 primary colon cancer, 9 liver metastasis, 10 lung metastasis, and 5 unclassified colon cancer), as well as 56 normal tissues (i.e., normal mucosa, liver, or kidney), 51 of which were matched to the CRC tissues. Tissue samples were obtained from CRC patients at Memorial Sloan Kettering Cancer Center (MSKCC), whose initial operations occurred between 1992 and 2004. Cancer samples included in SNP array analysis were characterized by pathologists (MSKCC) to have ≧70% pure tumor cells. Acquisition of tissues followed the strict protocols of the Institutional Review Boards of MSKCC and Cornell University Weill Medical College.

### Example 2

### RNA Preparation

[0099] Total RNA from microdissected tissue samples (both tumor and normal tissue samples) was prepared following the protocol recommended by Affymetrix (Santa Clara, Calif.). RNA was extracted from homogenized tissues using the Trizol protocol (Guanidinium thiocyanate-phenol-chloroform extraction) (Invitrogen Corp.) and purified using RNeasy columns (Qiagen).

### Example 3

### Genomic DNA Sample Extraction

[0100] Microdissected tissue samples (50-100 mg) were homogenized in liquid nitrogen and suspended in 400 ul proteinase K solution (50 ul 20 mg/ml proteinase K in proteinase K buffer). Phenol/chloroform (500 ul) was added and the mixture was shaken thoroughly in a phase lock gel tube. The upper aqueous layer containing genomic DNA was transferred to a separate tube and washed with isopropanol and 70% ethanol. The resulting pellet was resuspended in molecular biology-grade water.

### Example 4

### Expression Array

[0101] To generate the expression array data, the protocol recommended by Affymetrix, Inc. was strictly followed. Briefly, first strand cDNA was synthesized from 10 mg total RNA, using the One-Cycle cDNA Synthesis kit (which includes T7 (dT) primer, and SuperScript II Reverse Transcriptase). Additional reagents from the same kit (i.e., 2nd strand reaction mix, E. coli DNA ligase, and E. coli Polymerase I) were used to synthesize the 2nd strand cDNA. The cDNA product was transcribed in vitro to produce biotin-labeled cRNA, using MEGAscript T7 Kit (Ambion, Inc.). The labeled cRNA was fragmented and hybridized to GeneChip Human Genome U133A Array chip at 45° C. for 16 h. Afterwards, the arrays were washed and stained using SAPE (streptavidin-phycoerythrin) and biotinylated anti-streptavidin antibody. All of the washing and staining procedures were conducted using the Affymetrix Fluidic Station 450 (FS450). Following hybridization, the arrays were scanned using the GeneChip Scanner 3000. The Affymetrix GCOS software was used to generate image (DAT), cell intensity (CEL), and analysis (CHP) files for every sample. Standard thresholding, filtering operations, and normalizations were applied such that the average intensity value across all probesets for every sample was around 69.

### Example 5

### Kaplan-Meier Survival Analysis

[0102] The primary colorectal cancer samples were classified into two groups according to the level of gene expression as determined by the Affymetrix U133A expression array. Kaplan-Meier survival analysis was used to determine the disease-specific survival patterns on selected genes in areas of chromosomal aberrations. Follow-up (0-175 months; median 74 months) was censored at death from other causes for the Kaplan-Meier analysis. Statistical analysis and curves were generated using the JMP statistical software (version 5.1.2, SAS institute, Cary, N.C., USA).

### Example 6

### Identifying Genes That Predict Disease Outcome in Patients Having Colon Cancer

[0103] Primary colon tumor samples from 166 patients were used in the analysis to identify genes that are predictive of disease outcome. Of these samples, 56 were derived from patients that had died of disease (DOD), and 110 samples were derived from patient that either had no evidence of disease (NED) in long term follow up, were alive with disease (AWD), or died of other or unknown causes (DOC/DUC). Samples from the 110 patients who did not die of disease are collectively referred to as “non-DOD”.

[0104] FIG. 2 depicts the steps of identifying the 176 and 71 gene predictor sets of the present invention that are useful for predicting disease outcome in subjects having colon cancer. First, the expression levels of 22283 gene transcripts in the 166 primary colon cancer samples were analyzed and classified as having high, average, or low expression based on percentile ranks. An initial score was generated for gene expression in each sample wherein +1 was assigned for higher than average tumor expression and 0 for lower than average expression. A second score was also generated wherein +1 was assigned for expression levels in the top third of average tumor expression levels, 0 was assigned for expression levels in the middle third of average tumor expression levels, and −1 was assigned for expression levels in the bottom third of average tumor expression levels. Genes that had poor expression patterns as determined by the average expression level and the standard deviation, or genes that had expression patterns that did not differ significantly from normal samples were eliminated from the analysis (FIG. 2).

[0105] A computer analysis was performed to identify genes that had expression levels in the top third in samples from patients who died of disease (DOD) but in the bottom third in samples taken from patients who did not die of disease (non-DOD), and identify genes that had expression levels in the bottom third in samples from DOD patients, but in the top third in samples from non-DOD patients. This analysis identified genes that had different expression patterns in DOD and non-DOD samples and were candidates for further analysis.

[0106] A difference score for each of these candidate gene was then calculated by subtracting the total number of DOD tumor samples where gene expression was in the bottom third of tumor expression from the total number of DOD tumor samples where gene expression was in the top third of tumor expression. Genes having a difference score outside of 12 to 19 or -23 to −12 were eliminated from analysis while the remaining genes, 383 in total, were further analyzed using Kaplan-Meier survival curves (FIG. 2).

[0107] Kaplan-Maier curves were manually generated for all of the 383 genes using the JMP statistical analysis program (SAS Institute, Cary, N.C.). The chi-square values and p-values for all of these curves were then used to sort the genes by the greatest difference in survival based on expression. The 383 gene set that was identified based on difference scores was narrowed to 176 genes, where the 176 genes had KM curves with a p-value ≦0.02. The 176 gene set was further narrowed to 71 genes based on those genes having KM curves with a p-value of ≦0.0125 as shown in FIG. 2.

[0108] Table 3 below summarizes additional parameters calculated for each gene in the 176 gene set, which includes the 71 gene set. These parameters include (1) the average expression value for a particular gene across all tumor samples (“Ave Tumor”) and the standard deviation for expression for each gene probe used to detect expression (“Stdev Tumor”); (2) the difference score (“Diff”) which is the total number of DOD samples where the gene expression level was in the top third of tumor expression level minus the total number DOD samples where the gene expression level was in the bottom third of tumor expression level; (3) the percentage DOD samples having gene expression values in the top third of tumor expression (“D+1%”); (4) the percentage of DOD samples having gene expression values equal to the average, or the middle third of tumor expression (“D0%”); (5) the percentage of DOD samples having gene expression values in the bottom third of tumor expression (“D−1%”); (6) the percentage of difference between the two curves in the Kaplan-Meier analysis (“KM %”) calculated by dividing the number of DOD samples where the gene was expressed in the top third over the number of DOD and non-DOD samples where the gene was expressed in the top third; and 7) the chi-square and p-values of the KM survival curve analysis. The last two columns of Table 3 indicate whether increased (“up”) or decreased (“down”) expression of the particular gene predicts an unfavorable prognosis (“Bad Outcome Score”) or a favorable prognosis (“Good Outcome Score”).

TABLE 3
Gene Expression Data for the 176-Gene Predictor Set

| | | | | | | | | | | | D + 1 U1Bad | D − 1 Good |
|---|---|---|---|---|---|---|---|---|---|---|---|---|
| | Accession | Avg | Stdev | | KM | | | | CHI | | Outcome | Outcome |
| Gene Symbol | Number | Tumor | Tumor | Diff | % | D + 1% | D0% | D − 1% | Square | P value | Score | Score |
| CYB5-M | 80777 | 155 | 75 | 19 | 35 | 53 | 31 | 18 | 12.1 | 0.0023 | Up | down |
| PSPC1 | 55269 | 128 | 40 | 19 | 35 | 53 | 31 | 18 | 11.8 | 0.0027 | Up | down |
| UNC84A | 23353 | 404 | 130 | 19 | 35 | 51 | 35 | 16 | 11.7 | 0.0029 | Up | down |
| CDC42BPA | 8476 | 186 | 84 | 19 | 35 | 53 | 31 | 18 | 11.6 | 0.0030 | Up | down |
| FLJ23091 | 79971 | 139 | 55 | 18 | 33 | 56 | 22 | 23 | 17.3 | 0.0002 | Up | down |
| CIGALT1 | 56913 | 96 | 36 | 18 | 33 | 56 | 22 | 23 | 15.6 | 0.0004 | Up | down |
| RYK | 6259 | 101 | 32 | 18 | 33 | 51 | 33 | 18 | 12.1 | 0.0024 | Up | down |
| MGC2601 | 79006 | 76 | 45 | 18 | 33 | 55 | 25 | 21 | 11.2 | 0.0037 | Up | down |
| PRDM2 | 7799 | 127 | 30 | 18 | 33 | 51 | 33 | 18 | 9.9 | 0.0072 | Up | down |
| KIAA0551 | 23043 | 108 | 48 | 18 | 33 | 47 | 40 | 14 | 9.4 | 0.0090 | Up | down |
| FKBP14 | 55033 | 74 | 30 | 18 | 33 | 51 | 33 | 18 | 9.3 | 0.0091 | Up | down |
| GSTA1 | 2938 | 89 | 22 | 18 | 33 | 49 | 37 | 16 | 8.9 | 0.0115 | Up | down |
| FLJ21195 | 64388 | 29 | 22 | 17 | 31 | 53 | 27 | 21 | 15.6 | 0.0004 | Up | down |
| EGFR | 1956 | 135 | 55 | 17 | 31 | 55 | 24 | 23 | 15.2 | 0.0005 | Up | down |
| NAB1 | 4664 | 276 | 96 | 17 | 31 | 51 | 31 | 20 | 12.7 | 0.0017 | Up | down |
| ZNF237 | 9205 | 52 | 33 | 17 | 32 | 52 | 30 | 20 | 11.9 | 0.0026 | Up | down |
| DOCK9 | 23348 | 185 | 418 | 17 | 32 | 48 | 38 | 16 | 11.1 | 0.0039 | Up | down |
| PRELP | 5549 | 127 | 68 | 17 | 32 | 51 | 31 | 19 | 9.9 | 0.0071 | Up | down |
| FLJ20195 | 373863 | 96 | 32 | 17 | 32 | 50 | 34 | 18 | 8.8 | 0.0124 | Up | down |
| FLJ20195 | 373863 | 121 | 31 | 17 | 32 | 48 | 38 | 16 | 7.9 | 0.0195 | Up | down |
| PDGFA | 5154 | 146 | 71 | 16 | 29 | 47 | 36 | 18 | 12.3 | 0.0021 | Up | down |
| GRP | 2922 | 60 | 59 | 16 | 29 | 49 | 33 | 20 | 12.1 | 0.0023 | Up | down |
| PTHLH | 5744 | 37 | 143 | 16 | 29 | 49 | 33 | 20 | 11.9 | 0.0026 | Up | |
| NISCH | 11188 | 443 | 555 | 16 | 29 | 47 | 36 | 18 | 9.7 | 0.0078 | Up | down |
| CLN5 | 1203 | 69 | 24 | 16 | 29 | 49 | 33 | 20 | 9.5 | 0.0086 | Up | down |
| RECQL | 5965 | 78 | 28 | 16 | 30 | 53 | 25 | 23 | 9.2 | 0.0101 | Up | down |
| USP12 | 219333 | 163 | 62 | 16 | 29 | 49 | 33 | 20 | 8.6 | 0.0136 | Up | down |
| DJ473B4 | 56180 | 177 | 68 | 16 | 29 | 49 | 33 | 20 | 8.5 | 0.0141 | Up | down |
| OGT | 8473 | 370 | 151 | 16 | 30 | 46 | 39 | 16 | 8.3 | 0.0157 | Up | down |
| OSBPL3 | 26031 | 95 | 39 | 16 | 29 | 49 | 33 | 20 | 8.0 | 0.0180 | Up | down |
| GALNS | 2588 | 127 | 37 | 16 | 29 | 49 | 33 | 20 | 8.0 | 0.0184 | Up | down |
| GLS | 2744 | 209 | 96 | 16 | 29 | 45 | 40 | 16 | 10.4 | 0.0054 | | down |
| ZNF198 | 7750 | 282 | 94 | 15 | 28 | 47 | 35 | 20 | 14.1 | 0.0009 | Up | down |
| HOXB7 | 3217 | 60 | 28 | 15 | 28 | 47 | 35 | 20 | 13.2 | 0.0014 | Up | down |
| COBL | 23242 | 172 | 73 | 15 | 28 | 47 | 35 | 20 | 11.8 | 0.0027 | Up | down |
| GRB10 | 2887 | 228 | 115 | 15 | 28 | 49 | 31 | 21 | 11.6 | 0.0030 | Up | down |
| PGDS | 27306 | 41 | 24 | 15 | 30 | 53 | 26 | 23 | 11.0 | 0.0041 | Up | |
| TLN1 | 7094 | 134 | 39 | 15 | 28 | 49 | 31 | 21 | 10.7 | 0.0046 | Up | down |
| AIP | 9049 | 353 | 81 | 15 | 29 | 50 | 30 | 21 | 10.5 | 0.0054 | Up | down |
| C7orf10 | 79783 | 21 | 24 | 15 | 28 | 47 | 35 | 20 | 10.3 | 0.0057 | Up | |
| MLAT4 | 55214 | 66 | 110 | 15 | 28 | 47 | 35 | 20 | 9.5 | 0.0088 | Up | down |
| SGCD | 6444 | 32 | 21 | 15 | 28 | 51 | 27 | 23 | 9.3 | 0.0094 | Up | |
| SMURF2 | 64750 | 196 | 82 | 15 | 28 | 47 | 35 | 20 | 9.2 | 0.0097 | Up | down |
| H-plk | 51351 | 108 | 44 | 15 | 28 | 49 | 31 | 21 | 9.1 | 0.0108 | Up | down |
| HLA-F | 285830 | 120 | 45 | 15 | 28 | 47 | 35 | 20 | 8.6 | 0.0134 | Up | down |
| — | | 68 | 33 | 15 | 28 | 47 | 35 | 20 | 8.5 | 0.0139 | Up | down |
| CGI-62 | 51101 | 132 | 58 | 15 | 29 | 50 | 30 | 21 | 8.2 | 0.0164 | Up | down |
| LANCL1 | 10314 | 120 | 42 | 15 | 28 | 47 | 35 | 20 | 8.2 | 0.0165 | Up | down |
| TRIM36 | 55521 | 36 | 24 | 15 | 28 | 47 | 35 | 20 | 7.8 | 0.0199 | Up | |
| RTN2 | 6253 | 90 | 45 | 15 | 28 | 45 | 38 | 18 | 10.4 | 0.0054 | | down |
| SOX4 | 6659 | 1055 | 392 | 15 | 28 | 44 | 42 | 16 | 9.5 | 0.0088 | | down |
| STK3 | 6788 | 136 | 70 | 15 | 28 | 45 | 38 | 18 | 8.6 | 0.0133 | | down |
| SCAMP1 | 9522 | 398 | 100 | 15 | 28 | 45 | 38 | 18 | 8.1 | 0.0177 | | down |
| KIAA0779 | 23023 | 125 | 45 | 15 | 28 | 45 | 38 | 18 | 8.0 | 0.0179 | | down |
| VPS41 | 27072 | 268 | 61 | 14 | 26 | 49 | 29 | 23 | 10.8 | 0.0044 | Up | |
| TES | 26136 | 561 | 170 | 14 | 26 | 51 | 25 | 25 | 10.5 | 0.0051 | Up | |
| CHST12 | 55501 | 63 | 31 | 14 | 26 | 49 | 29 | 23 | 10.5 | 0.0053 | Up | |
| BART1 | 23568 | 49 | 133 | 14 | 30 | 47 | 38 | 18 | 10.4 | 0.0054 | Up | down |
| PAM | 5066 | 446 | 158 | 14 | 26 | 51 | 25 | 25 | 10.4 | 0.0056 | Up | |
| KNS2 | 3831 | 267 | 113 | 14 | 26 | 49 | 29 | 23 | 10.0 | 0.0067 | Up | |
| C6orf15 | 29113 | 45 | 88 | 14 | 26 | 49 | 30 | 23 | 9.4 | 0.0089 | Up | |
| HUMPPA | 30850 | 64 | 86 | 14 | 26 | 49 | 29 | 23 | 9.0 | 0.0111 | Up | |
| FLJ14054 | 79614 | 63 | 50 | 14 | 26 | 51 | 26 | 25 | 8.6 | 0.0132 | Up | |
| RoXaN | 23264 | 102 | 44 | 14 | 26 | 49 | 30 | 23 | 7.9 | 0.185 | Up | |
| ZNF430 | 80264 | 122 | 43 | 14 | 26 | 42 | 44 | 16 | 10.2 | 0.0060 | | down |
| — | | 70 | 27 | 14 | 26 | 42 | 44 | 16 | 8.8 | 0.0120 | | down |
| ARL4 | 10124 | 285 | 111 | 14 | 26 | 45 | 36 | 20 | 8.8 | 0.0121 | | down |
| OGT | 8473 | 361 | 167 | 14 | 26 | 45 | 36 | 20 | 8.3 | 0.0158 | | down |
| SF3B1 | 23451 | 335 | 97 | 14 | 26 | 44 | 40 | 18 | 8.2 | 0.0163 | | down |
| SAV1 | 60485 | 80 | 43 | 13 | 24 | 51 | 24 | 27 | 12.1 | 0.0023 | Up | |
| FLJ10357 | 55701 | 115 | 50 | 13 | 24 | 51 | 24 | 27 | 10.6 | 0.0051 | Up | |
| ETV1 | 2115 | 37 | 32 | 13 | 24 | 51 | 24 | 27 | 10.0 | 0.0066 | Up | |
| FACL4 | 2182 | 58 | 31 | 13 | 24 | 49 | 27 | 25 | 9.4 | 0.0089 | Up | |
| FLT1 | | 55 | 23 | 13 | 24 | 49 | 27 | 25 | 9.3 | 0.0092 | Up | |
| MAP4 | 4134 | 315 | 70 | 13 | 24 | 49 | 27 | 25 | 9.3 | 0.0094 | Up | |
| NUMB | 8650 | 143 | 35 | 13 | 24 | 51 | 24 | 27 | 8.4 | 0.0149 | Up | |
| TG737 | 8100 | 207 | 89 | 13 | 25 | 49 | 28 | 25 | 8.2 | 0.0160 | Up | |
| CG005 | 10443 | 153 | 75 | 13 | 24 | 44 | 38 | 20 | 11.4 | 0.0033 | | down |
| SYNGR1 | 9145 | 55 | 26 | 12 | 22 | 49 | 25 | 27 | 9.9 | 0.0070 | Up | |
| ORAOV2 | 55107 | 88 | 94 | 12 | 23 | 42 | 41 | 19 | 10.2 | 0.0060 | | down |
| METTL3 | 56339 | 89 | 26 | 12 | 22 | 42 | 40 | 20 | 9.1 | 0.0107 | | down |
| IMAGE: 4215339 | 113177 | 24 | 32 | 12 | 23 | 42 | 41 | 19 | 8.9 | 0.0113 | | down |
| GHITM | 227069 | 612 | 192 | −13 | −23 | 25 | 27 | 48 | 9.6 | 0.0081 | down | |
| WDR1 | 9948 | 754 | 179 | −13 | −23 | 25 | 27 | 48 | 8.8 | 0.0121 | down | |
| PBP | 5037 | 509 | 173 | −13 | −23 | 27 | 24 | 50 | 8.2 | 0.0169 | down | |
| MGC5247 | 79029 | 132 | 57 | −13 | −23 | 18 | 42 | 41 | 11.0 | 0.0040 | | Up |
| FLJ22457 | 79961 | 159 | 49 | −13 | −23 | 19 | 41 | 41 | 8.9 | 0.0118 | | Up |
| USP3 | 9960 | 271 | 75 | −13 | −23 | 20 | 38 | 43 | 7.9 | 0.0191 | | Up |
| U2AF2 | 11338 | 111 | 47 | −14 | −25 | 24 | 29 | 48 | 11.3 | 0.0034 | down | |
| TNFSF10 | 8743 | 159 | 82 | −14 | −25 | 25 | 25 | 50 | 9.5 | 0.0084 | down | |
| DHX15 | 1665 | 1164 | 291 | −14 | −25 | 24 | 29 | 48 | 8.6 | 0.0132 | down | |
| UCP2 | 7351 | 379 | 261 | −14 | −25 | 25 | 25 | 50 | 8.5 | 0.0139 | down | |
| MFHAS1 | 9258 | 178 | 71 | −14 | −24 | 18 | 41 | 42 | 11.2 | 0.0036 | | Up |
| CCT2 | 10576 | 1156 | 310 | −14 | −25 | 20 | 36 | 45 | 11.0 | 0.0040 | | Up |
| TNFRSF10B | 8795 | 74 | 40 | −14 | −25 | 20 | 36 | 45 | 10.1 | 0.0065 | | Up |
| IL15RA | 3601 | 170 | 56 | −14 | −25 | 18 | 40 | 43 | 9.5 | 0.0086 | | Up |
| DHX15 | 1665 | 685 | 209 | −14 | −25 | 18 | 40 | 43 | 9.3 | 0.0097 | | Up |
| PSMD9 | 5715 | 292 | 83 | −14 | −25 | 20 | 36 | 45 | 8.6 | 0.0137 | | Up |
| ELP3 | 55140 | 78 | 24 | −14 | −25 | 20 | 36 | 45 | 8.2 | 0.0162 | | Up |
| TMEM4 | 10330 | 257 | 73 | −15 | −26 | 25 | 24 | 52 | 15.1 | 0.0005 | down | |
| ATP5B | 506 | 2062 | 631 | −15 | −26 | 25 | 24 | 52 | 14.4 | 0.0007 | down | |
| LAP3 | 41056 | 593 | 288 | −15 | −26 | 25 | 24 | 52 | 14.2 | 0.0008 | down | |
| BF | 629 | 246 | 142 | −15 | −26 | 22 | 31 | 48 | 12.3 | 0.0021 | down | Up |
| SORD | 6652 | 251 | 73 | −15 | −26 | 26 | 23 | 52 | 12.1 | 0.0023 | down | |
| WARS | 7453 | 303 | 214 | −15 | −26 | 25 | 24 | 52 | 11.7 | 0.0029 | down | |
| PIGR | 5284 | 473 | 567 | −15 | −26 | 22 | 31 | 48 | 11.3 | 0.0035 | down | Up |
| CLN6 | 91860 | 192 | 98 | −15 | −26 | 25 | 24 | 52 | 10.4 | 0.0054 | down | |
| AKR1A1 | 10327 | 535 | 179 | −15 | −26 | 22 | 31 | 48 | 9.9 | 0.0068 | down | Up |
| PBP | 5037 | 1006 | 597 | −15 | −26 | 22 | 31 | 48 | 9.7 | 0.0076 | down | Up |
| UQCRFS1 | 7386 | 1301 | 396 | −15 | −26 | 24 | 27 | 50 | 9.6 | 0.0080 | down | |
| MCM5 | 4174 | 95 | 221 | −15 | −26 | 22 | 31 | 48 | 9.4 | 0.0092 | down | Up |
| DKFZp566C0424 | 26099 | 86 | 46 | −15 | −26 | 24 | 27 | 50 | 9.1 | 0.0107 | down | |
| UQCRH | 7388 | 1537 | 506 | −15 | −26 | 22 | 31 | 48 | 8.9 | 0.0115 | down | Up |
| MMP3 | 4314 | 311 | 321 | −15 | −26 | 22 | 31 | 48 | 8.9 | 0.0117 | down | Up |
| ARL61P4 | | 192 | 45 | −15 | −26 | 22 | 31 | 48 | 8.5 | 0.0142 | down | Up |
| FLJ14827 | 84934 | 40 | 36 | −15 | −26 | 24 | 27 | 50 | 8.4 | 0.0153 | down | |
| FDFT1 | 2222 | 938 | 477 | −15 | −26 | 22 | 31 | 48 | 8.0 | 0.0181 | down | Up |
| H2AFZ | 3015 | 1025 | 472 | −15 | −26 | 24 | 27 | 50 | 7.9 | 0.0186 | down | |
| DKFZP564G2022 | 25963 | 576 | 318 | −15 | −26 | 18 | 38 | 45 | 13.0 | 0.0015 | | Up |
| RPS27L | 51065 | 1489 | 480 | −15 | −26 | 20 | 35 | 46 | 12.2 | 0.0022 | | Up |
| KIAA1277 | 27147 | 49 | 31 | −15 | −26 | 20 | 35 | 46 | 11.1 | 0.0039 | | Up |
| UBE2L6 | 9246 | 435 | 200 | −15 | −26 | 18 | 38 | 45 | 10.4 | 0.0055 | | Up |
| KIF13B | 23303 | 220 | 154 | −15 | −26 | 20 | 35 | 46 | 8.1 | 0.0167 | | Up |
| XPO7 | 23039 | 132 | 36 | −16 | −28 | 20 | 33 | 48 | 17.3 | 0.0002 | down | Up |
| Clorf16 | 9887 | 56 | 33 | −16 | −27 | 22 | 29 | 49 | 13.6 | 0.0011 | down | Up |
| TEGT | 7009 | 1413 | 336 | −16 | −28 | 25 | 22 | 54 | 11.8 | 0.0027 | down | Up |
| RQCD1 | | 48 | 32 | −16 | −28 | 20 | 33 | 48 | 11.4 | 0.0033 | down | Up |
| KIAA0826 | 285527 | 317 | 151 | −16 | −28 | 22 | 29 | 50 | 11.2 | 0.0036 | down | Up |
| LAMP3 | 27074 | 72 | 46 | −16 | −28 | 22 | 29 | 50 | 11.1 | 0.0038 | down | Up |
| SQRDL | 58472 | 643 | 317 | −16 | −28 | 18 | 36 | 46 | 11.2 | 0.0038 | down | Up |
| NAT1 | 9 | 165 | 81 | −16 | −28 | 20 | 33 | 48 | 10.7 | 0.0047 | down | Up |
| NSEP1 | 4904 | 1957 | 735 | −16 | −28 | 20 | 33 | 48 | 10.5 | 0.0052 | down | Up |
| KIAA0746 | | 439 | 137 | −16 | −28 | 20 | 33 | 48 | 9.5 | 0.0085 | down | Up |
| CCNA2 | 890 | 172 | 85 | −16 | −28 | 20 | 33 | 48 | 9.4 | 0.0087 | down | Up |
| ISG20 | 3669 | 174 | 102 | −16 | −28 | 20 | 33 | 48 | 9.2 | 0.0099 | down | Up |
| MTSG1 | 57509 | 283 | 121 | −16 | −28 | 18 | 36 | 46 | 9.0 | 0.0110 | down | Up |
| AP3D1 | 8943 | 56 | 21 | −16 | −26 | 22 | 30 | 48 | 9.0 | 0.0113 | down | Up |
| LOC203069 | 203069 | 108 | 35 | −16 | −28 | 22 | 29 | 50 | 8.9 | 0.0116 | down | Up |
| SRP72 | 6731 | 574 | 143 | −16 | −28 | 20 | 33 | 48 | 8.8 | 0.0125 | down | Up |
| — | 1534 | 370 | 103 | −16 | −28 | 18 | 36 | 46 | 8.4 | 0.0147 | down | Up |
| SSNA1 | 8636 | 183 | 47 | −16 | −28 | 20 | 33 | 48 | 8.0 | 0.0183 | down | Up |
| FLJ10525 | 55161 | 206 | 67 | −16 | −28 | 22 | 29 | 50 | 7.8 | 0.0197 | down | |
| TEGT | 7009 | 1252 | 328 | −16 | −28 | 15 | 44 | 43 | 23.1 | 0.0001 | | Up |
| FLJ10579 | 55177 | 228 | 52 | −16 | −28 | 16 | 40 | 45 | 13.6 | 0.0011 | | Up |
| FLJ20699 | 55020 | 114 | 72 | −16 | −28 | 16 | 40 | 45 | 9.2 | 0.0099 | | Up |
| MYRIP | 25924 | 30 | 26 | −16 | −27 | 22 | 30 | 49 | 8.7 | 0.0131 | | Up |
| DAZAP2 | 9802 | 1313 | 275 | −17 | −30 | 20 | 31 | 50 | 15.5 | 0.0004 | down | Up |
| UMP-CMPK | 51727 | 800 | 256 | −17 | −30 | 24 | 24 | 54 | 14.9 | 0.0006 | down | |
| MRPL46 | 26589 | 147 | 43 | −17 | −30 | 24 | 24 | 54 | 14.3 | 0.0008 | down | |
| FLJ20452 | 54939 | 133 | 53 | −17 | −30 | 16 | 38 | 46 | 13.7 | 0.0011 | down | Up |
| GCHFR | 2644 | 122 | 54 | −17 | −30 | 20 | 31 | 50 | 13.1 | 0.0015 | down | Up |
| ASNA1 | 439 | 214 | 51 | −17 | −30 | 20 | 31 | 50 | 11.7 | 0.0028 | down | Up |
| TAPBP-R | 55080 | 108 | 54 | −17 | −30 | 16 | 38 | 46 | 11.1 | 0.0039 | down | Up |
| TOPK | 55872 | 148 | 100 | −17 | −30 | 16 | 38 | 46 | 11.0 | 0.0041 | down | Up |
| — | 5265 | 990 | 1187 | −17 | −30 | 18 | 35 | 48 | 10.8 | 0.0046 | down | Up |
| SERPINA1 | 5265 | 619 | 873 | −17 | −30 | 18 | 35 | 48 | 10.7 | 0.0047 | down | Up |
| KIAA1185 | 57470 | 378 | 93 | −17 | −30 | 22 | 27 | 52 | 10.3 | 0.0057 | down | Up |
| SLC39A8 | 64116 | 175 | 111 | −17 | −30 | 18 | 35 | 48 | 9.2 | 0.0100 | down | Up |
| KIAA0746 | | 765 | 256 | −17 | −30 | 18 | 35 | 48 | 8.5 | 0.0141 | down | Up |
| MUF1 | 10489 | 156 | 48 | −17 | −30 | 20 | 31 | 50 | 7.8 | 0.0195 | down | Up |
| HAN11 | 10238 | 83 | 28 | −17 | −30 | 15 | 42 | 45 | 14.2 | 0.0008 | | Up |
| CNOT7 | 29883 | 509 | 189 | −17 | −30 | 15 | 42 | 45 | 10.1 | 0.0065 | | Up |
| PIGT | 51604 | 440 | 160 | −17 | −30 | 15 | 42 | 45 | 9.5 | 0.0084 | | Up |
| GSR | 2936 | 132 | 92 | −18 | −32 | 18 | 33 | 50 | 15.5 | 0.0004 | down | Up |
| ITGAE | 3682 | 315 | 111 | −18 | −32 | 15 | 40 | 46 | 13.4 | 0.0012 | down | Up |
| CASP1 | 834 | 92 | 74 | −18 | −32 | 18 | 33 | 50 | 12.1 | 0.0024 | down | Up |
| UCP2 | 7351 | 271 | 102 | −18 | −32 | 18 | 33 | 50 | 11.5 | 0.0032 | down | Up |
| DDX23 | 9416 | 171 | 76 | −18 | −32 | 18 | 33 | 50 | 11.2 | 0.0037 | down | Up |
| CGI-51 | | 146 | 208 | −18 | −32 | 18 | 33 | 50 | 9.8 | 0.0074 | down | Up |
| COX5A | 9377 | 1135 | 354 | −19 | −34 | 20 | 27 | 54 | 16.3 | 0.0003 | down | Up |
| MAPKAPK5 | 8550 | 162 | 50 | −19 | −34 | 16 | 35 | 50 | 15.9 | 0.0004 | down | Up |
| MCSR1 | 10445 | 202 | 63 | −19 | −34 | 20 | 27 | 54 | 13.9 | 0.0010 | down | Up |
| — | | 2673 | 736 | −19 | −34 | 20 | 27 | 54 | 13.3 | 0.0012 | down | Up |
| SLC25A3 | 5250 | 2389 | 573 | −19 | −34 | 16 | 35 | 50 | 13.4 | 0.0012 | down | Up |
| PSMA5 | 5686 | 591 | 189 | −19 | −34 | 16 | 35 | 50 | 13.2 | 0.0013 | down | Up |
| CXCL11 | 6373 | 116 | 210 | −19 | −34 | 20 | 27 | 54 | 12.5 | 0.0019 | down | Up |
| GRHPR | 9380 | 213 | 66 | −19 | −34 | 16 | 35 | 50 | 8.1 | 0.0169 | down | Up |
| SFPQ | 6421 | 716 | 188 | −20 | −34 | 22 | 22 | 56 | 16.6 | 0.0002 | down | Up |
| NDUFC1 | 4717 | 744 | 298 | −20 | −35 | 18 | 29 | 54 | 14.4 | 0.0007 | down | Up |
| C12orf8 | 10961 | 821 | 247 | −21 | −37 | 16 | 31 | 54 | 17.7 | 0.0001 | down | Up |
| SLC39A8 | 64116 | 233 | 154 | −21 | −37 | 18 | 27 | 55 | 15.7 | 0.0004 | down | Up |
| MGC5576 | 79022 | 577 | 215 | −23 | −41 | 20 | 20 | 61 | 30.6 | 0.0001 | down | Up |

[0109] Using the above-described methods, genes having expression levels above the average tumor expression level and genes having expression levels below the average tumor expression level in samples derived from patients who generally had poor outcome were discovered. The final list of validated genes was sorted by chromosomal location to identify consistent patterns of over or under expression that were chromosome location specific.

[0110] FIG. 4 is a scatterplot graphing the predicted survival outcome for the 166 stage I-IV primary colon cancers based on the 71 gene predictor set determined as outlined above. The x-axis of the plot depicts the percentage of genes for a given tumor sample that had expression values associated with a bad disease outcome. The y-axis of the plot depicted the percentage of genes for a given tumor sample that had expression values associated with a good disease outcome. Tumor samples from DOD patients (n=56) are represented by squares and all other samples (i.e., non-DOD) are represented by diamonds. Group 1 had good prognosis with only 6% being categorized as DOD. Group 4 had poor prognosis with 70% being categorized as DOD. Groups 2 and 3 had intermediate prognosis levels. Treatment, therefore, could be tailored to expected survival outcome as illustrated in the figure.

[0111] FIGS. 5A-E are scatterplots graphing the predicted outcomes for the 166 stage I-IV primary colon cancer tumor samples based on gene expression levels of the 71-genes in the 71-gene predictor set. The percentage of DOD patients increases steadily in each subgroup from Group 1 (0%) to Group 2A+2B (14%) to Group 3A+3B (42%) to Group 4 (69%) to Group 5+6 (83%). In FIGS. 5B, 5C, 5D and 5E, stage I, II, III and IV tumors are identified, respectively, and demonstrate binning is somewhat based on stage.

[0112] FIG. 6 is a scatterplot graphing the predicted outcome for the 166 stage I-IV primary colon cancer tumor samples based on gene expression levels of the 1389-genes in the 1389-gene predictor set. The stratification of survival outcome did not improve significantly between the 71 gene set and the 1389 gene set.

[0113] FIGS. 7 and 8 are scatterplots graphing the predicted outcome for the 166 stage I-IV primary colon cancer tumor samples based on gene expression levels of the 101 genes in the 101-gene predictor set ranked by the odds ratio analysis. The low risk category can be segregated from the intermediate and high risk categories by the lines indicated on the graph. The low risk category had 2% of patients who were in the DOD category. The high risk group by contrast had 87% of patients in the DOD category. The intermediate risk had 56% of patients in the DOD category. The predicted outcome for each patient can be used to tailor an individualized treatment plan for the patient as shown below each scatterplot.

[0114] FIGS. 9 and 10 are scatterplots graphing the predicted outcome for the 166 stage I-IV primary colon cancer tumor samples based on gene expression levels of the 71 genes in the 71-gene predictor set as shown in FIG. 4 with LRAT methylation status of various samples identified. Several DOD samples that had binned to group 1 based on gene expression levels had low to no LRAT methylation, which predicts poor prognosis. Removing these samples from group 1 based on LRAT methylation status improved the performance of the prognosis prediction in the low risk category. The low risk category in this analysis only had 3% of patients in the DOD category. The low risk groups had excellent prediction of good outcome. Group 1 does not contain patients with DOD status while Group 2A+2B only has 6% of patients with DOD status.

[0115] FIG. 11 is a scatterplot graphing the predicted outcome for the 166 stage I-IV primary colon cancer tumor samples based on gene expression levels of the 101 genes in the 101-gene predictor set ranked by difference score. Inclusion of LRAT methylation status was useful to reclassify some patient outcomes and improve the fidelity of prediction.

[0116] FIG. 16 shows the Kaplan Meier curves of genes found on the highly dysregulated chromosomal arm 8p. These genes, predictive of patient outcome, were identified from SNP and aberration studies from 89 tumor samples. In each case loss of expression of these genes was predictive of worse outcome, consistent with the common loss of the 8p chromosomal arm, where these genes are located.

[0117] Typically, Kaplan Meier curves revealed expression patterns with normal distribution (FIG. 19) or skewed distribution (FIG. 20), when expression levels were split into top, middle and bottom thirds.

### Example 7

### Validation of Genes That Predict Disease Outcome in Patients Having Colon Cancer

[0118] An additional 22 samples (FIG. 26), that were not included in the initial analysis, were used to validate the 71 gene list predictor set. None of the patient samples that binned to Group 1, where the prediction is for a good outcome, were derived from patients who DOD. Liver (FIG. 27) and lung (FIG. 28) metastases samples, largely binned to Group 4 when assessed for gene expression using the 71 gene predictor set. Large adenomas (FIG. 29), binned to group 1 in the majority of cases, unless there was the presence of synchronous metastases or tumor, consistent with early disease. Matched normal mucosa tissue (FIG. 30), adjacent to tumor, but no less than 10 cm from the tumor, when applied to the outcome predictor 71 gene set, binned to the various groups dependent upon outcome, possibly predicting a field effect or patient predisposition using expression profiling. FIG. 31 shows matched normal and tumor samples from the same patient, and the “direction” the expression profile of the outcome predictor 71 gene list, travels from normal to tumor samples, as indicated by the arrows. Typically, the normal tissue predicts a “better” outcome than the tumor tissue, again validating a role for this list of genes in tumor progression.

### Example 8

### Human Mapping (SNP) Array

[0119] SNP analysis was performed using the Affymetrix GeneChip Human Mapping 50K array Xba 240 array (or SNP array) following the protocol provided by Affymetrix (“GeneChip Mapping 100K Assay Manual”). Briefly, 0.25 μg of genomic DNA was digested with XbaI. The digests were ligated, PCR-amplified (such that the products were in the range of 250 to 2,000 bp), fragmented, biotin-labeled, and hybridized to the array. As in the expression array protocol, the SNP arrays also underwent staining and washing in Fluidics Station 450 (FS450) with the use of SAPE (streptavidin-phycoerythrin) and biotinylated anti-streptavidin antibody. The arrays were scanned in GeneChip Scanner 3000 to generate the image (DAT) and cell intensity (CEL) files. The CEL files were imported to GeneChip Genotyping Analysis Software (GTYPE) ver 4.1 software to generate the SNP calls.

### Example 9

### DNA Copy Number Analysis

[0120] The functionalities of Chromosomal Copy Number Analysis Tool (GNAT) software are embedded in GTYPE and the concepts and algorithms are initially described by Huang et al., “Whole Genome DNA Copy Number Changes Identified by High Density Oligonucleotide Arrays,” Hum. Genomics 1(4):287-99 (2004), which is hereby incorporated by reference in its entirety. GNAT uses the probe intensity data, as well as the GDAS-produced SNP calls to generate both the Single Point Analysis (SPA) and Genomic Smoothed Analysis (GSA) copy number (CN) estimates and the corresponding p-values. In addition, GNAT also generates the measures of loss of heterozygosity (LOH) based on the SNP calls. Once the SNP genotype calls and copy number estimates were obtained using GTYPE and GNAT, the data was further processed to refine the copy number data and to provide LOH calls that accommodate tissue and/or DNA aberration heterogeneity resulting in partially changed DNA (e.g. DNA with single gains at a given location in some of the strands and copy-neutral in other strands of the same chromosomal location). Regions of variation in copy number data are identified by applying segmentation and spatial filtering algorithms. The results are not constrained to integers. Sample-specific copy neutral, gain, and loss levels are obtained. For the LOH analysis, the SNPs that undergo an actual loss of heterozygosity from a normal control sample to the case sample are taken as input together with the SNPs that remain heterozygous. The majority of SNPs which are homozygous in the normal sample are ignored, as they are uninformative for regions of LOH. These two kind of SNPs are spatially averaged to allow for the effects of tissue heterogeneity. For those samples that lack a matched normal sample, the LOH values are inferred from the homozygosity data based on the relationship between these two quantities obtained from the matched tumor and normal samples.

[0121] Shown in FIGS. 17 and 18 are heat maps depicting the chromosomal aberrations (gain, loss, copy neutral LOH) for each colorectal cancer sample analyzed by SNP arrays. Also indicated are each patient's clinical status (AUN, alive unknown; AWD, alive with disease; DOC, dead of other causes; DOD, dead of disease; DUN, dead of unknown disease; NED, no evidence of disease). Each figure also indicates the status of microsatellite instability for each sample, which can be classified as MSS (microsatellite stable), MSI-H (high level of microsatellite instability), MSI-L (low level of microsateliite instability), according to the 5 marker-criteria set by Bolan et al., “A National Cancer Institute Workshop on Microsatellite Instability for Cancer Detection and Familial Predisposition: Development of International Criteria for the Determination of Microsatellite Instability in Colorectal Cancer” Cancer Research 58:5248-57 (1998), which is hereby incorporated by reference in its entirety. In addition, a sample may be categorized as MSI-H-P (high level of microsatellite instability), in accordance to the three marker-criteria suggested by Nash et al., “Automated, Multiplex Assay for High-Frequency Microsatellite Instability in Colorectal Cancer” J Clin Oncol 21:3105-12 (2003), which is hereby incorporated by reference in its entirety.

### Example 10

### Gene Expression Dysregulation in Regions of Chromosomal Aberrations

[0122] The simultaneous use of SNP and expression arrays allows one to analyze the patterns of gene expression in chromosomal regions usually characterized by aberrations (copy gains/losses involving either whole chromosomal arms, or regions of smaller size). Chromosomal arms 7p, 7q, 8q, 13q, 20p, and 20q, which usually gain additional copies in colorectal cancer, also have a high percentage of upregulated genes (see FIG. 13). On the other hand, the chromosomal arms 4q, 8p, 14q, 17p, 18p, and 18q, which are often lost in colorectal cancer, are marked by a high proportion of downregulated genes (FIG. 13). To determine if a gene is downregulated/upregulated, (zₚₛ)_{Ti}=(PS_{Ti}−AvePS_{N})/(σPS)_{N} was calculated, where PS_{Ti}; is the normalized intensity level of a probeset (ps) (which represents a given gene) for the tumor sample Ti, AvePS_{N} is the average intensity of a probeset (ps) among the normal mucosa samples, (σPS)_{N} is the standard deviation of the intensity of ps among the normal mucosa samples. The percent upregulation of a given gene (100 (# tumor samples with zₚₛ≧3)/71) and the percent downregulation of a given gene (100 (# tumor samples with zₚₛ≦3)/71) was also calculated. “71” refers to the number of tumor samples represented in both SNP and expression array analyses. In FIG. 12, a red circle represents a gene whose percent upregulation is at least 10, while a green circle represents a gene whose percent downregulation is at least 10. As shown in FIG. 13, the highest upregulation rates occur in the 20q, 13q, 8q, 20p, 7p, and 7q chromosome arms, while downregulation of genes is most often seen in 18p, 18q, 17p, 14q, 15q, 4q and 8p chromosome arms. Therefore, the direction of changes in gene expression levels is often consistent with the types of aberrations occurring in the chromosomal arms where these genes are located. The effect of copy number to gene expression is also illustrated in FIG. 14. As demonstrated in this figure, the often lost 8p arm is populated by genes with reduced levels of expression, while the usually gained 8q arm contains a high percentage of upregulated genes. The expression levels of the top disregulated genes in those aneuploid chromosomes/chromosome arms are concordant with their prognostic effects. In other words, whether the lower expression of a gene considered downregulated, and higher expression of a gene considered upregulated, are indicative of poorer prognosis among the colon cancer patients was investigated. This was done by generating Kaplan-Meier (KM) plots based entirely on the levels of expression (182 colon cancer samples were divided into two: high expression and low expression groups) of the dysregulated genes indicated in FIG. 12. Table 4 is a list of 59 dysregulated genes which satisfied the following criteria: a) the p-value (log rank or Wilcoxon) for KM is less than or equal to 0.05, and b) lower expression levels of downregulated genes, or higher expression levels of upregulated genes correlating to worse clinical outcome.

TABLE 4
Chromosomal Aberrations Corresponding to Expression Changes and Outcome

| | | | | Chromosomal | Class- | Accession | |
|---|---|---|---|---|---|---|---|
| Probe | Gene | | | Location_{—} | ifica- | # (Entrez | |
| Set ID | ID | AKA | Gene Title | MDB | tion | Gene ID) | Probe Sequence(s) |
| 202678_at | GTF2A2 | HsT18745, | general | chr15q22.2 | Loss_{—} | 2958 | AAGCCATGGCATATCAG |
| | | TF2A2, | transcription | | down | | TTATACAG |
| | | TFIIA | factor IIA, 2, | | | | (SEQ ID NO: 5379) |
| | | | 12 kDa | | | | TGGGAAACAGTCTTCAG |
| | | | | | | | GAGAGCCT |
| | | | | | | | (SEQ ID NO: 5380) |
| | | | | | | | TCATACAGTCTCAACAG |
| | | | | | | | ATCACCCC |
| | | | | | | | (SEQ ID NO: 5381) |
| | | | | | | | TTGCCCTTCAAGTTCTA |
| | | | | | | | CTTCAGTT |
| | | | | | | | (SEQ ID NO: 5382) |
| | | | | | | | TGCAGCACTGGCTCAGA |
| | | | | | | | GGGTCAGG |
| | | | | | | | (SEQ ID NO: 5383) |
| | | | | | | | TCAGGGGCTCTCTAAAT |
| | | | | | | | ACGTACAG |
| | | | | | | | (SEQ ID NO: 5384) |
| | | | | | | | GATTCTGCGATAATGTG |
| | | | | | | | TGGACTTT |
| | | | | | | | (SEQ ID NO: 5385) |
| | | | | | | | AATACTGGCTCCAATAC |
| | | | | | | | TACAGAAT |
| | | | | | | | (SEQ ID NO: 5386) |
| | | | | | | | CACCATCTTCTGTTATT |
| | | | | | | | CATTGCTT |
| | | | | | | | (SEQ ID NO: 5387) |
| | | | | | | | GAAACTTGTAACTCTGT |
| | | | | | | | AGCCTCTT |
| | | | | | | | (SEQ ID NO: 5388) |
| | | | | | | | CCTCTTACATCACCTTT |
| | | | | | | | ATTATACA |
| | | | | | | | (SEQ ID NO: 5389) |
| 219060_at | C8orf | FLJ10204 | chromosome 8 | chr8q24.13 | Gain_{—} | 55093 | AAGCTATCCTTTCATCG |
| | 32 | | open reading | | up | | AGGACAGC |
| | | | frame 32 | | | | (SEQ ID NO: 5390) |
| | | | | | | | ACATTATGGTACAGTTG |
| | | | | | | | GCTTGGAA |
| | | | | | | | (SEQ ID NO: 5391) |
| | | | | | | | GGCTTGGAATTATGTCT |
| | | | | | | | TTCTCTTT |
| | | | | | | | (SEQ ID NO: 5392) |
| | | | | | | | GTGCGTACTTGCTAAGAT |
| | | | | | | | ATTCCTG |
| | | | | | | | (SEQ ID NO: 5393) |
| | | | | | | | GATATTCCTGTGGCTCA |
| | | | | | | | TGCGTTAC |
| | | | | | | | (SEQ ID NO: 5394) |
| | | | | | | | GCGTTACAACACGAGGA |
| | | | | | | | CTTAAGCC |
| | | | | | | | (SEQ ID NO: 5395) |
| | | | | | | | AAGCCAGTAATCGTTTT |
| | | | | | | | TGTTCAGA |
| | | | | | | | (SEQ ID NO: 5396) |
| | | | | | | | AGAGGTGTGGAGGTAGA |
| | | | | | | | GCCAGCCC |
| | | | | | | | (SEQ ID NO: 5397) |
| | | | | | | | TGTCTCTCCAGCTACAT |
| | | | | | | | TGTAAGTT |
| | | | | | | | (SEQ ID NO: 5398) |
| | | | | | | | AAATGCCCATAAAAGGT |
| | | | | | | | GCCCATAA |
| | | | | | | | (SEQ ID NO: 5399) |
| | | | | | | | AGCCCTCTCAGACTTGA |
| | | | | | | | GCGTTAAT |
| 201950_x_at | CAPZB | RP4- | capping protein | chr1p36.1 | Loss_{—} | 832 | ACAAGTTGACCTCCACG |
| | | 657E11.7, | (actin filament) | | down | | GTGATGCT |
| | | CAPB, | muscle Z-line, | | | | (SEQ ID NO: 5401) |
| | | CAPPB, | beta | | | | GATGCTGTGGCTGCAGA |
| | | CAPZ | | | | | CCAACAAA |
| | | MGC104401, | | | | | (SEQ ID NO: 5402) |
| | | MGC129749, | | | | | GACCAACAAATCTGGCT |
| | | MGC129750 | | | | | CTGGCACC |
| | | | | | | | (SEQ ID NO: 5403) |
| | | | | | | | GGCACCATGAACCTCGG |
| | | | | | | | AGGCAGCC |
| | | | | | | | (SEQ ID NO: 5404) |
| | | | | | | | TGAAACTGTGAGTGACT |
| | | | | | | | GCTCCCCA |
| | | | | | | | (SEQ ID NO: 5405) |
| | | | | | | | TCCCCACACATAGCCAA |
| | | | | | | | CATCGGGC |
| | | | | | | | (SEQ ID NO: 5406) |
| | | | | | | | ACATCGGGCGCCTGGTA |
| | | | | | | | GAGGACAT |
| | | | | | | | (SEQ ID NO: 5407) |
| | | | | | | | CTGTTTCATGCTAACCA |
| | | | | | | | GACACGCC |
| | | | | | | | (SEQ ID NO: 5408) |
| | | | | | | | TGCACTCGTTAGATTCC |
| | | | | | | | TTTCTTAG |
| | | | | | | | (SEQ ID NO: 5409) |
| | | | | | | | AACAGCTGCATCATTGA |
| | | | | | | | CCGCACAG |
| | | | | | | | (SEQ ID NO: 5410) |
| | | | | | | | AGAATAAAGCCGATAGC |
| | | | | | | | CACCTCCT |
| | | | | | | | (SEQ ID NO: 5411) |
| 211595_s_at | MRPS11 | HCC-2; | mitochondrial | chr15q25 | Loss_{—} | 64963 | ACACAGATCCAGGTAGT |
| | | FLJ22512; | ribosomal | | down | | CTCTGCTA |
| | | FLJ23406 | protein S11 | | | | (SEQID NO: 5412) |
| | | | | | | | GTCTCTGCTAGTAATG |
| | | | | | | | AGCCCCTTG |
| | | | | | | | (SEQ ID NO: 5413) |
| | | | | | | | AGCACAGACAGCAGGCA |
| | | | | | | | TAGCCGCA |
| | | | | | | | (SEQ ID NO: 5414) |
| | | | | | | | AGCCGCAGCGGCGAGAG |
| | | | | | | | CTAAACAA |
| | | | | | | | (SEQ ID NO: 5415) |
| | | | | | | | CAAAAGGGCGTGATCCA |
| | | | | | | | CATCCGAG |
| | | | | | | | (SEQ ID NO: 5416) |
| | | | | | | | TTGTCTGCCATGCACGG |
| | | | | | | | ACTGATCA |
| | | | | | | | (SEQ ID NO: 5417) |
| | | | | | | | GGACTGATCATGGGCGG |
| | | | | | | | CCTGGAAG |
| | | | | | | | (SEQ ID NO: 5418) |
| | | | | | | | CTCAGCTCCAGTGGGAC |
| | | | | | | | CTTGTAAA |
| | | | | | | | (SEQ ID NO: 5419) |
| | | | | | | | GGACCTTGTAAAATGCT |
| | | | | | | | CCCTGTCA |
| | | | | | | | (SEQ ID NO: 5420) |
| | | | | | | | TCCCTGTCAGAGCTCTC |
| | | | | | | | CAGAATAT |
| | | | | | | | (SEQ ID NO: 5421) |
| | | | | | | | GGTGTGCCCCAGAAGTA |
| | | | | | | | AGCTTTGC |
| | | | | | | | (SEQ ID NO: 5422) |
| 212447_at | KBTBD2 | BKLHD1 | kelch repeat | chr7p14.3 | Gain_{—} | 25948 | ACAGGTCTTCCAGTCAG |
| | | | and BTB (POZ) | | up | | CTGGTCAT |
| | | | domain | | | | (SEQ ID NO: 5423) |
| | | | containing 2 | | | | CAGTAAGAATTGCCAGC |
| | | | | | | | CACTCATT |
| | | | | | | | (SEQ ID NO: 5424) |
| | | | | | | | CCACTCATTGTGCGGGT |
| | | | | | | | CTGCGTGG |
| | | | | | | | (SEQ ID NO: 5425) |
| | | | | | | | AAGCCTCCACTTTCTGT |
| | | | | | | | ATTATGTT |
| | | | | | | | (SEQ ID NO: 5426) |
| | | | | | | | GCTGATGTAGTTCTCCA |
| | | | | | | | TCTTCAAG |
| | | | | | | | (SEQ ID NO: 5427) |
| | | | | | | | CAGGAATTCTCTGCACT |
| | | | | | | | AGCTGTGC |
| | | | | | | | (SEQ ID NO: 5428) |
| | | | | | | | AACTAGCGCTGCTCTGG |
| | | | | | | | CATTAATC |
| | | | | | | | (SEQ ID NO: 5429) |
| | | | | | | | AATCCCAGGAACCACTA |
| | | | | | | | GCAGTAGT |
| | | | | | | | (SEQ ID NO: 5430) |
| | | | | | | | CGCCGCCAATCTAACAT |
| | | | | | | | GAGCACAG |
| | | | | | | | (SEQ ID NO: 5431) |
| | | | | | | | AGCACAGGTGCTTCATG |
| | | | | | | | ACAAACAT |
| | | | | | | | (SEQ ID NO: 5432) |
| | | | | | | | TCAACTGCACCATGTTC |
| | | | | | | | TGGCACTG |
| | | | | | | | (SEQ ID NO: 5433) |
| 202675_at | SDHB | FLJ92337, | succinate | chr1p36.1- | Loss_{—} | 6390 | ACCCTCTTCCACACATG |
| | | IP, PGL4, | dehydrogenase | p35 | down | | TATGTGAT |
| | | SDH, SDH1, | complex, | | | | (SEQ ID NO: 5434) |
| | | SDHIP | subunit B, | | | | AAAGGATCTTGTTCCC |
| | | | iron sulfur | | | | GATTTGAGC |
| | | | (Ip) | | | | (SEQ ID NO: 5435) |
| | | | | | | | GTTCCCGATTTGAGCAA |
| | | | | | | | CTTCTATG |
| | | | | | | | (SEQ ID NO: 5436) |
| | | | | | | | TTTGAGCAACTTCTATG |
| | | | | | | | CACAGTAC |
| | | | | | | | (SEQ ID NO: 5437) |
| | | | | | | | AGGATGAATCTCAGGAA |
| | | | | | | | GGCAAGCA |
| | | | | | | | (SEQ ID NO: 5438) |
| | | | | | | | GCAGTCCATAGAAGAGC |
| | | | | | | | GTGAGAAA |
| | | | | | | | (SEQ ID NO: 5439) |
| | | | | | | | AAGAGCGTGAGAAACTG |
| | | | | | | | GACGGGCT |
| | | | | | | | (SEQ ID NO: 5440) |
| | | | | | | | GGAACGGAGACAAATAT |
| | | | | | | | CTGGGGCC |
| | | | | | | | (SEQ ID NO: 5441) |
| | | | | | | | ATATCTGGGGCCTGCAG |
| | | | | | | | TTCTTATG |
| | | | | | | | (SEQ ID NO: 5442) |
| | | | | | | | CTGCAGTTCTTATGCAG |
| | | | | | | | GCCTATCG |
| | | | | | | | (SEQ ID NO: 5443) |
| | | | | | | | GATGACTTCACAGAGGA |
| | | | | | | | GCGCCTGG |
| | | | | | | | (SEQ ID NO: 5444) |
| 202838_at | FUCA1 | RP11- | fucosidase, | chr1p34 | Loss_{—} | 2517 | AGAAAGAGGCGCTGCTC |
| | | 45G17.1, | alpha-L-1, | | down | | ACTGTTTT |
| | | FUCA | tissue | | | | (SEQ ID NO: 5445) |
| | | | | | | | TAATCAACGAACTTCTC |
| | | | | | | | TTCTCCAC |
| | | | | | | | (SEQ ID NO: 5446) |
| | | | | | | | CTCCACCCAGAGATGGC |
| | | | | | | | TTTTCCAA |
| | | | | | | | (SEQ ID NO: 5447) |
| | | | | | | | ACAATGGAATCTTCCCT |
| | | | | | | | CTGTTCTC |
| | | | | | | | (SEQ ID NO: 5448) |
| | | | | | | | CTCTGATAACCTACTTG |
| | | | | | | | CTTACTCA |
| | | | | | | | (SEQ ID NO: 5449) |
| | | | | | | | CAATGCCTTTAAGCCAA |
| | | | | | | | GTCACCCT |
| | | | | | | | (SEQ ID NO: 5450) |
| | | | | | | | CCAAGTCACCCTGTTGC |
| | | | | | | | CTATGGGA |
| | | | | | | | (SEQ ID NO: 5451) |
| | | | | | | | GATTTGGCAAGCTCAAC |
| | | | | | | | CACATGCT |
| | | | | | | | (SEQ ID NO: 5452) |
| | | | | | | | GTTGTCACCAACAGTCT |
| | | | | | | | TTCTGCAA |
| | | | | | | | (SEQ ID NO: 5453) |
| | | | | | | | GGAAAAGGCTTACCAGG |
| | | | | | | | CTGCTATG |
| | | | | | | | (SEQ ID NO: 5454) |
| | | | | | | | GGCTGCTATGGTCAACT |
| | | | | | | | CTTCAGAA |
| | | | | | | | (SEQ ID NO: 5455) |
| 216510_x_at | EXOC7 | 2-5-3p, | immunoglobulin | chr17q25.1 | Loss_{—} | 28396/// | AGTGGGTCTCAGCTATT |
| | | DKFZp686J | heavy constant | | down | 3493/// | AGTGGGAG |
| | | 04253, | alpha 1/// | | | 3495/// | (SEQ ID NO: 5456) |
| | | EX070, | immunoglobulin | | | 3500/// | TCAGCTATTAGTGGGAG |
| | | EXO70, | heavy constant | | | 3507/// | TGCAGGTA |
| | | EXOC1, | delta/// | | | 3509 | (SEQ ID NO: 5457) |
| | | Exo70p, | immunoglobulin | | | | GGAGTGCAGGTACCACA |
| | | FLJ40965, | heavy constant | | | | TACTACGC |
| | | FLJ46415, | gamma 1 (G1m | | | | (SEQ ID NO: 5458) |
| | | YJL085W | marker)/// | | | | CAGGTACCACATACTAC |
| | | | immunoglobulin | | | | GCAGACTC |
| | | | heavy constant | | | | (SEQ ID NO: 5459) |
| | | | mu/// | | | | TACGCAGACTCCGTGAA |
| | | | immunoglobulin | | | | GGGCCGGT |
| | | | heavy variable | | | | (SEQ ID NO: 5460) |
| | | | group/// | | | | TTCACCACCTCCAGAGA |
| | | | immunoglobulin | | | | CAATTCCA |
| | | | heavy variable | | | | (SEQ ID NO: 5461) |
| | | | 4-31 | | | | GACAATTCCAAGAACAC |
| | | | | | | | GCTGTATC |
| | | | | | | | (SEQ ID NO: 5462) |
| | | | | | | | CAAGAACACGCTGTATC |
| | | | | | | | TGCAAATG |
| | | | | | | | (SEQ ID NO: 5463) |
| | | | | | | | CTGAGAGCCGAGGACAC |
| | | | | | | | GGCCGTAT |
| | | | | | | | (SEQ ID NO: 5464) |
| | | | | | | | GACACGGCCGTATATTA |
| | | | | | | | CTGTGCGA |
| | | | | | | | (SEQ ID NO: 5465) |
| | | | | | | | GCCGTATATTACTGTGC |
| | | | | | | | GAAATCCC |
| | | | | | | | (SEQ ID NO: 5466) |
| 221774_x_at | FAM48A | C13; | family with | chr13q13.3 | Gain_{—} | 55578 | ATACTTCAAGTCTCAGG |
| | | FP757; | sequence | | up | | CCCTTAAA |
| | | P38IP; | similarity 48, | | | | (SEQ ID NO: 5467) |
| | | C13orf19; | member A | | | | CTTAAATCTACTCCAG |
| | | bA421P11.4 | | | | | CTTCCAGGT |
| | | | | | | | (SEQ ID NO: 5468) |
| | | | | | | | TATTTTTAACACTCTG |
| | | | | | | | CAGCAGCAG |
| | | | | | | | (SEQ ID NO: 5469) |
| | | | | | | | GTAGTCCTCAACAGCCA |
| | | | | | | | GGGGAGCA |
| | | | | | | | (SEQ ID NO: 5470) |
| | | | | | | | CAAGAACAGGCCTTATC |
| | | | | | | | TGCTCAGC |
| | | | | | | | (SEQ ID NO: 5471) |
| | | | | | | | CAGTCACAGGCAGCTGC |
| | | | | | | | AGTTGCGA |
| | | | | | | | (SEQ ID NO: 5472) |
| | | | | | | | GCAGTTGCGATTCTTGC |
| | | | | | | | AGCATCAA |
| | | | | | | | (SEQ ID NO: 5473) |
| | | | | | | | GCAGCAGCAGCACAAAC |
| | | | | | | | AGCTCAGC |
| | | | | | | | (SEQ ID NO: 5474) |
| | | | | | | | AGCTCAGCTACATCATC |
| | | | | | | | ATCGGCAT |
| | | | | | | | (SEQ ID NO: 5475) |
| | | | | | | | TCATCGGCATACAGGCA |
| | | | | | | | GCCAGTCA |
| | | | | | | | (SEQ ID NO: 5476) |
| | | | | | | | GTCTTGCATTACTTTTT |
| | | | | | | | GTTCCTTT |
| | | | | | | | (SEQ IDNO: 5477) |
| 200027_at | NARS | ASNRS, | asparaginyl- | chr18q21.2- | Loss_{—} | 4677 | ATCTTTTCTAACTCTGC |
| | | NARS1 | tRNA | q21.3 | down | | TTAGCTGC |
| | | | synthetase | | | | (SEQ ID NO: 5478) |
| | | | | | | | AGCTGCTAATAATCCTG |
| | | | | | | | AGGCATAG |
| | | | | | | | (SEQ ID NO: 5479) |
| | | | | | | | TAGTGATTCACAGTATC |
| | | | | | | | CCTCTTAG |
| | | | | | | | (SEQ ID NO: 5480) |
| | | | | | | | AGTATCCCTCTTAGCAT |
| | | | | | | | TAATTTAA |
| | | | | | | | (SEQ ID NO: 5481) |
| | | | | | | | GAGGCAGATTGATITTC |
| | | | | | | | CCTCTTTC |
| | | | | | | | (SEQ ID NO: 5482) |
| | | | | | | | CCCACCATGTCCTTAGA |
| | | | | | | | TCTAATCT |
| | | | | | | | (SEQ ID NO: 5483) |
| | | | | | | | TAGATCTAATCTGTGCT |
| | | | | | | | ACCTTATT |
| | | | | | | | (SEQ ID NO: 5484) |
| | | | | | | | GCTACCTTATTAACTCA |
| | | | | | | | CAGCAGGC |
| | | | | | | | (SEQ ID NO: 5485) |
| | | | | | | | ACAGCAGGCTTACTGAA |
| | | | | | | | TGGCTTCA |
| | | | | | | | (SEQ ID NO: 5486) |
| | | | | | | | CAGATTTAGTTGATTTC |
| | | | | | | | TCCACCAA |
| | | | | | | | (SEQ ID NO: 5487) |
| | | | | | | | GCATGTCATGTATTCTC |
| | | | | | | | AATAGGCT |
| | | | | | | | (SEQ ID NO: 5488) |
| 208540_x_at | LOC | S100A11P | hypothetical | chr7q22.1 | Gain_{—} | 729659 | ATGGCAAAAATCTCCAG |
| | 729659 | | LOC729659 | | up | | CCCTACAG |
| | | | | | | | (SEQ ID NO: 5489) |
| | | | | | | | CTCCAGCCCTACAGAGA |
| | | | | | | | CTGAGCGG |
| | | | | | | | (SEQ ID NO: 5490) |
| | | | | | | | GACTGAGCGGTGCATTG |
| | | | | | | | AGTCCCTG |
| | | | | | | | (SEQ ID NO: 5491) |
| | | | | | | | AGTCCCTGATTGCTGTT |
| | | | | | | | TTCCAGAA |
| | | | | | | | (SEQ ID NO: 5492) |
| | | | | | | | GGATGGTTACAACCGCA |
| | | | | | | | ATCTCTCC |
| | | | | | | | (SEQ ID NO: 5493) |
| | | | | | | | CAACCGCAATCTCTCCA |
| | | | | | | | AGACGGAG |
| | | | | | | | (SEQ ID NO: 5494) |
| | | | | | | | GACGGAGTTCCTAAGCT |
| | | | | | | | TCATGAAT |
| | | | | | | | (SEQ ID NO: 5495) |
| | | | | | | | GAGCTGGCTGCCTTTAC |
| | | | | | | | AAAGAACC |
| | | | | | | | (SEQ ID NO: 5496) |
| | | | | | | | CCGGTGTCCTTGACCAC |
| | | | | | | | ATGAAGAA |
| | | | | | | | (SEQ ID NO: 5497) |
| | | | | | | | GATGTCAGCAGTGATGG |
| | | | | | | | GCAGTTAG |
| | | | | | | | (SEQ ID NO: 5498) |
| | | | | | | | AATCTGATTGGTGGCCT |
| | | | | | | | AGCTGTGG |
| | | | | | | | (SEQ ID NO: 5499) |
| 208813_at | GOT1 | GIG18 | glutamic- | chr10q24.1- | Loss_{—} | 2805 | ATGGCTGACCGGATTCT |
| | | | oxaloacetic | q25.1 | down | | GACCATGA |
| | | | transaminase 1, | | | | (SEQ ID NO: 5500) |
| | | | soluble | | | | GGCACGACTAGAAGCCC |
| | | | (aspartate | | | | TCAAAACC |
| | | | amino- | | | | (SEQ ID NO: 5501) |
| | | | transferase | | | | AAATTGGCATGTTCAG |
| | | | 1) | | | | CTTCACTGG |
| | | | | | | | (SEQ ID NO: 5502) |
| | | | | | | | GCTGCCAAGTGGTCGAA |
| | | | | | | | TCAACGTG |
| | | | | | | | (SEQ ID NO: 5503) |
| | | | | | | | CTCCATCCATGAAGCAG |
| | | | | | | | TCACCAAA |
| | | | | | | | (SEQ ID NO: 5504) |
| | | | | | | | TCCAGTGAAGAAACACC |
| | | | | | | | ACCCGTCC |
| | | | | | | | (SEQ ID NO: 5505) |
| | | | | | | | GTCCAGTACCACCAAAG |
| | | | | | | | TAGTTCTC |
| | | | | | | | (SEQ ID NO: 5506) |
| | | | | | | | CTGCCTGCACAAACCTA |
| | | | | | | | CATGTACA |
| | | | | | | | (SEQ ID NO: 5507) |
| | | | | | | | GACTGAAAGGCTGCTCT |
| | | | | | | | GGTGAGGC |
| | | | | | | | (SEQ ID NO: 5508) |
| | | | | | | | TAAACCGGCCCCACATG |
| | | | | | | | AAGAGAAC |
| | | | | | | | (SEQ ID NO: 5509) |
| | | | | | | | GAGAACATCCCTTGAGA |
| | | | | | | | CGAATTTG |
| | | | | | | | (SEQ ID NO: 5510) |
| 218371_s_at | PSPC1 | RP11- | paraspeckle | chr13q12.11 | Gain_{—} | 55269 | ATGTGGCTGAAGTTACC |
| | | 523H24.2, | component 1 | | up | | CGAAGTTC |
| | | DKFZp566B | | | | | (SEQ ID NO: 5511) |
| | | 1447, | | | | | GTTACCCGAAGTTCAGC |
| | | FLJ10955, | | | | | TTGCAGTG |
| | | PSP1 | | | | | (SEQ ID NO: 5512) |
| | | | | | | | AGTTCAGCTTGCAGTGT |
| | | | | | | | AATTCAGA |
| | | | | | | | (SEQ ID NO: 5513) |
| | | | | | | | GAATCATACTTCCTTTC |
| | | | | | | | AGGTCAAA |
| | | | | | | | (SEQ ID NO: 5514) |
| | | | | | | | GTGGGAAATATCCTGTT |
| | | | | | | | CGTGACCT |
| | | | | | | | (SEQ ID NO: 5515) |
| | | | | | | | TCCTGTTCGTGACCTAG |
| | | | | | | | GAGAAACA |
| | | | | | | | (SEQ ID NO: 5516) |
| | | | | | | | TTCTTACTCCATACAAG |
| | | | | | | | CAGTTTAT |
| | | | | | | | (SEQ ID NO: 5517) |
| | | | | | | | AAACATGCTACAGGGGC |
| | | | | | | | ACATTTTC |
| | | | | | | | (SEQ ID NO: 5518) |
| | | | | | | | ACAGGGGCACATTTTCT |
| | | | | | | | GTGGTTAA |
| | | | | | | | (SEQ ID NO: 5519) |
| | | | | | | | GCAGTTTTCCTTTGCAT |
| | | | | | | | TGAGGGTT |
| | | | | | | | (SEQ ID NO: 5520) |
| | | | | | | | CTTTGCATTGAGGGTTT |
| | | | | | | | TGGCTTTT |
| | | | | | | | (SEQ ID NO: 5521) |
| 202962_at | KIF13B | GAKIN, | kinesin family | chr8p21.1 | Loss_{—} | 23303 | ATGTTTCTGGGCCTACC |
| | | KIAA0639 | member 13B | | down | | AAGGTTCA |
| | | | | | | | (SEQ ID NO: 5522) |
| | | | | | | | CTGGGAATGTGACTGCT |
| | | | | | | | GGAGCCTG |
| | | | | | | | (SEQ ID NO: 5523) |
| | | | | | | | TGAGAGTGTGTGTTGGT |
| | | | | | | | GGCTGTGC |
| | | | | | | | (SEQ ID NO: 5524) |
| | | | | | | | ACAAGACGGGAGTCACC |
| | | | | | | | CTGTGCTT |
| | | | | | | | (SEQ ID NO: 5525) |
| | | | | | | | CCAAGATACTGACCCAT |
| | | | | | | | TGAACCCC |
| | | | | | | | (SEQ ID NO: 5526) |
| | | | | | | | TTCTCTCCACAAAGTCC |
| | | | | | | | GTGGTGCC |
| | | | | | | | (SEQ ID NO: 5527) |
| | | | | | | | GGTGGGCTGCAGACACT |
| | | | | | | | AATGGTGT |
| | | | | | | | (SEQ ID NO: 5528) |
| | | | | | | | GGTCTTGGAACAGCTTC |
| | | | | | | | TCTATGTG |
| | | | | | | | (SEQ ID NO: 5529) |
| | | | | | | | GCTTCTCTATGTGTGGA |
| | | | | | | | TTCGTGTA |
| | | | | | | | (SEQ ID NO: 5530) |
| | | | | | | | AACCACCTGTAATTTTG |
| | | | | | | | TACCATAT |
| | | | | | | | (SEQ ID NO: 5531) |
| | | | | | | | GTACCATATGTGTCTTC |
| | | | | | | | CATCAAA |
| | | | | | | | (SEQ ID NO: 5532) |
| 212166_at | XPO7 | KIAA0745, | exportin 7 | chr8p21 | Loss_{—} | 23039 | ATTCCTGTTACTGTATT |
| | | RANBP16 | | | down | | AACCCTTG |
| | | | | | | | (SEQ ID NO: 5533) |
| | | | | | | | GGAACTCTAAGCCATGC |
| | | | | | | | CAGAACAC |
| | | | | | | | (SEQ ID NO: 5534) |
| | | | | | | | CCCTAGCCCCTTGCAGT |
| | | | | | | | GATAAATA |
| | | | | | | | (SEQ ID NO: 5535) |
| | | | | | | | GTGTTTGGTGTTCTTAT |
| | | | | | | | CTCCACCC |
| | | | | | | | (SEQ ID NO: 5536) |
| | | | | | | | TCAGACAGATGCCTCTT |
| | | | | | | | GCTTTTAA |
| | | | | | | | (SEQ ID NO: 5537) |
| | | | | | | | ACGTGTTGTAGGGTTCT |
| | | | | | | | TGGTCTGT |
| | | | | | | | (SEQ ID NO: 5538) |
| | | | | | | | GAGAAGGAAGTGAGCCC |
| | | | | | | | ACTGCTCT |
| | | | | | | | (SEQ ID NO: 5539) |
| | | | | | | | ATGTGGGTGAGTCCACC |
| | | | | | | | AGAGGCCC |
| | | | | | | | (SEQ ID NO: 5540) |
| | | | | | | | CCAGCCCTCGAGGCAGT |
| | | | | | | | GTGTGTGG |
| | | | | | | | (SEQ ID NO: 5541) |
| | | | | | | | ATATGTACCCTGCACTC |
| | | | | | | | ATGAATGT |
| | | | | | | | (SEQ ID NO: 5542) |
| | | | | | | | GAAGTATTTAACATTCT |
| | | | | | | | CCCATCCC |
| | | | | | | | (SEQ ID NO: 5543) |
| 217962_at | NOLA3 | MGC70651, | nucleolar protein | chr15q14- | Loss_{—} | 55505 | ATTGACGAACACGTGAC |
| | | NOP10, | family A, member | q15 | down | | GCGGTCGG |
| | | NOP10P | 3 (H/ACA small | | | | (SEQ ID NO: 5544) |
| | | | nucleolar RNPs) | | | | CGGACCACTGCAGACTG |
| | | | | | | | AGCGGTGG |
| | | | | | | | (SEQ ID NO: 5545) |
| | | | | | | | GATCATGTTCTCCAGTA |
| | | | | | | | TTACCTC |
| | | | | | | | (SEQ ID NO: 5546) |
| | | | | | | | TGACCCGATGGGACAAC |
| | | | | | | | AGACCTGC |
| | | | | | | | (SEQ ID NO: 5547) |
| | | | | | | | GGTTCTCCCCAGATGAC |
| | | | | | | | AAATACTC |
| | | | | | | | (SEQ ID NO: 5548) |
| | | | | | | | TCTCGACACCGAATCAC |
| | | | | | | | CATCAAGA |
| | | | | | | | (SEQ ID NO: 5549) |
| | | | | | | | GCTTCAAGGTGCTCATG |
| | | | | | | | ACCCAGCA |
| | | | | | | | (SEQ ID NO: 5550) |
| | | | | | | | TGAGGGTCCCTTAAACT |
| | | | | | | | GATGTCTT |
| | | | | | | | (SEQ ID NO: 5551) |
| | | | | | | | GAGACTCCGTAACCAAA |
| | | | | | | | CTCTTCGG |
| | | | | | | | (SEQ ID NO: 5552) |
| | | | | | | | ACCAAACTCTTCGGACT |
| | | | | | | | GTGAGCCC |
| | | | | | | | (SEQ ID NO: 5553) |
| | | | | | | | GCCATACTCTTTGGCAT |
| | | | | | | | CCAGTCTC |
| | | | | | | | (SEQ ID NO: 5554) |
| 218273_s_at | PPM2C | FLJ32517, | protein | chr8q22.1 | Gain_{—} | 54704 | ATTGACTTTGCAGCAGG |
| | | MGC119646, | phosphatase 2C, | | up | | GTGGCAGG |
| | | PDH, PDP, | magnesium- | | | | (SEQ ID NO: 5555) |
| | | PDP1, | dependent, | | | | GTCCTGCCTAGCTCAGA |
| | | PDPC | catalytic | | | | TTTCATGG |
| | | | subunit | | | | (SEQ ID NO: 5556) |
| | | | | | | | CAGATTTCATGGCACCT |
| | | | | | | | GCACTTGA |
| | | | | | | | (SEQ ID NO: 5557) |
| | | | | | | | CACTTCTTTATCACAGG |
| | | | | | | | TGTCTTGA |
| | | | | | | | (SEQ ID NO: 5558) |
| | | | | | | | TAGCTTCTTTTACCAAC |
| | | | | | | | CTGAGAAA |
| | | | | | | | (SEQ ID NO: 5559) |
| | | | | | | | GTATCTTGCTGTGTGTA |
| | | | | | | | GTCTCTTG |
| | | | | | | | (SEQ ID NO: 5560) |
| | | | | | | | TCACACCTTTCTTCACT |
| | | | | | | | GAGATTCC |
| | | | | | | | (SEQ ID NO: 5561) |
| | | | | | | | TCCAGTTCTTCAAGCCA |
| | | | | | | | TAAATGAC |
| | | | | | | | (SEQ ID NO: 5562) |
| | | | | | | | GATTATTTGACTGGAAT |
| | | | | | | | GCTTCTTA |
| | | | | | | | (SEQ ID NO: 5563) |
| | | | | | | | GAATAACTATACTCCGT |
| | | | | | | | TATCCACC |
| | | | | | | | (SEQ ID NO: 5564) |
| | | | | | | | TATCCACCCGATTTCCT |
| | | | | | | | AATGTAAT |
| | | | | | | | (SEQ ID NO: 5565) |
| 200847_s_at | TMEM66 | FLJ22274, | trans- | chr8p12 | Loss_{—} | 51669 | ATTTCTAAAACCTGTGA |
| | | FOAP-7, | protein 66 | | down | | TGCCCTAA |
| | | HSPC035, | | | | | (SEQ ID NO: 5566) |
| | | MGC8721, | | | | | AGGTGGTTGTAGCTGAT |
| | | XTP3 | | | | | GAGTTATT |
| | | | | | | | (SEQ ID NO: 5567) |
| | | | | | | | TTATGCTAATTTGTGAG |
| | | | | | | | TTCTGATC |
| | | | | | | | (SEQ ID NO: 5568) |
| | | | | | | | TCTGATCACTTTTGAGC |
| | | | | | | | TCTGAAGC |
| | | | | | | | (SEQ ID NO: 5569) |
| | | | | | | | GAGCTCTGAAGCTTTGA |
| | | | | | | | ATCATTCA |
| | | | | | | | (SEQ ID NO: 5570) |
| | | | | | | | TCAGTGGTGGAGATGGC |
| | | | | | | | CTTCTGGT |
| | | | | | | | (SEQ ID NO: 5571) |
| | | | | | | | GGAGATGGCCTTCTGGT |
| | | | | | | | AACTGAAT |
| | | | | | | | (SEQ ID NO: 5572) |
| | | | | | | | TAACTGAATATTACCTT |
| | | | | | | | CTGTAGGA |
| | | | | | | | (SEQ ID NO: 5573) |
| | | | | | | | TGTGAATGACTCTGTGC |
| | | | | | | | TGGCAAAA |
| | | | | | | | (SEQ ID NO: 5574) |
| | | | | | | | AAACCTCTATATTTCTT |
| | | | | | | | TCGTTCAT |
| | | | | | | | (SEQ ID NO: 5575) |
| | | | | | | | TAACAAAAGCATGCAGT |
| | | | | | | | TCTCTGTG |
| | | | | | | | (SEQ ID NO: 5576) |
| 209374_s_at | IGHM | DKFZp686I | immunoglobulin | chr14q32.33 | Loss_{—} | 3507 | CACCATCACGTGCCTGG |
| | | 15196, | heavy constant | | down | | TGACGGGC |
| | | DKFZp686I | mu | | | | (SEQ ID NO: 5577) |
| | | 15212, | | | | | GACGTCTTCGTGCAGTG |
| | | FLJ00385, | | | | | GATGCAGA |
| | | MGC104996, | | | | | (SEQ ID NO: 5578) |
| | | MGC52291, | | | | | GCAGTGGATGCAGAGGG |
| | | MU, VH | | | | | GGCAGCCC |
| | | | | | | | (SEQ ID NO: 5579) |
| | | | | | | | GATGCAGAGGGGGCAGC |
| | | | | | | | CCTTGTCC |
| | | | | | | | (SEQ ID NO: 5580) |
| | | | | | | | GCCCTTGTCCCCGGAGA |
| | | | | | | | AGTATGTG |
| | | | | | | | (SEQ ID NO: 5581) |
| | | | | | | | CCGGAGAAGTATGTGAC |
| | | | | | | | CAGCGCCC |
| | | | | | | | (SEQ ID NO: 5582) |
| | | | | | | | CATCCTGACCGTGTCCG |
| | | | | | | | AAGAGGAA |
| | | | | | | | (SEQ ID NO: 5583) |
| | | | | | | | GACCGTGTCCGAAGAGG |
| | | | | | | | AATGGAAC |
| | | | | | | | (SEQ ID NO: 5584) |
| | | | | | | | TGCCCAACAGGGTCACC |
| | | | | | | | GAGAGGAC |
| | | | | | | | (SEQ ID NO: 5585) |
| | | | | | | | GTCACCGAGAGGACCGT |
| | | | | | | | GGACAAGT |
| | | | | | | | (SEQ ID NO: 5586) |
| | | | | | | | CGAGAGGACCGTGGACA |
| | | | | | | | AGTCCACC |
| | | | | | | | (SEQ ID NO: 5587) |
| 54970_at | ZMIZ2 | DKFZp761I | zinc finger, | chr7p13 | Gain_{—} | 83637 | CAGCTTCAAGCAGAGG |
| | | 2123, | MIZ-type | | up | | CCTCGGGGT |
| | | KIAA1886, | containing 2 | | | | (SEQ ID NO: 5588) |
| | | ZIMP7, | | | | | TGTAGAAACACTAACAG |
| | | hZIMP7 | | | | | CTGGGAGA |
| | | | | | | | (SEQ ID NO: 5589) |
| | | | | | | | ATCAGGGAGGAACCTCC |
| | | | | | | | AATGGGTG |
| | | | | | | | (SEQ ID NO: 5590) |
| | | | | | | | AGGAGGAAGCCACTGCA |
| | | | | | | | TCTGTTGG |
| | | | | | | | (SEQ ID NO: 5591) |
| | | | | | | | GCATCTGTTGGCTCAGG |
| | | | | | | | GCCCCAGC |
| | | | | | | | (SEQ ID NO: 5592) |
| | | | | | | | CGCCTGGGCTGTTGTGT |
| | | | | | | | CTCCTGTC |
| | | | | | | | (SEQ ID NO: 5593) |
| | | | | | | | CTGTTGTGTCTCCTGTC |
| | | | | | | | TGTGCCGA |
| | | | | | | | (SEQ ID NO: 5594) |
| | | | | | | | GTTGTGTCTCCTGTCTG |
| | | | | | | | TGCCGATC |
| | | | | | | | (SEQ ID NO: 5595) |
| | | | | | | | TGTCTCCTGTCTGTGCC |
| | | | | | | | GATCTCTA |
| | | | | | | | (SEQ ID NO: 5596) |
| | | | | | | | CTGTCTGTGCCGATCTC |
| | | | | | | | TATTAAAG |
| | | | | | | | (SEQ ID NO: 5597) |
| | | | | | | | GTCTGTGCCGATCTCTA |
| | | | | | | | TTAAAGGA |
| | | | | | | | (SEQ ID NO: 5598) |
| | | | | | | | CTGTGCCGATCTCTATT |
| | | | | | | | AAAGGACT |
| | | | | | | | (SEQ ID NO: 5599) |
| | | | | | | | GTGCCGATCTCTATTAA |
| | | | | | | | AGGACTCC |
| | | | | | | | (SEQ ID NO: 5600) |
| | | | | | | | GCCGATCTCTATTAAAG |
| | | | | | | | GACTCCCT |
| | | | | | | | (SEQ ID NO: 5601) |
| | | | | | | | CTCTATTAAAGGACTCC |
| | | | | | | | CTCTTGGT |
| | | | | | | | (SEQ ID NO: 5602) |
| | | | | | | | CTATTAAAGGACTCCCT |
| | | | | | | | CTTGGTGG |
| | | | | | | | (SEQ ID NO: 5603) |
| 200611_s_at | WDR1 | AIP1, | WD repeat | chr4p16.1 | Loss_{—} | 9948 | CATGCAAAAATCGTCTG |
| | | NORI-1 | domain 1 | | down | | CCTGGCCT |
| | | | | | | | (SEQ ID NO: 5604) |
| | | | | | | | TGGCCTGGTCCCCAGAC |
| | | | | | | | AATGAACA |
| | | | | | | | (SEQ ID NO: 5605) |
| | | | | | | | AGACAATGAACACTTTG |
| | | | | | | | CCTCCGGT |
| | | | | | | | (SEQ ID NO: 5606) |
| | | | | | | | ACTTTGCCTCCGGTGGC |
| | | | | | | | ATGGACAT |
| | | | | | | | (SEQ ID NO: 5607) |
| | | | | | | | GTGTATGTTTGGACCCT |
| | | | | | | | GAGTGACC |
| | | | | | | | (SEQ ID NO: 5608 |
| | | | | | | | AAGATCCAAGATGCAC |
| | | | | | | | ACCGGCTGC |
| | | | | | | | (SEQ ID NO: 5609) |
| | | | | | | | ATGATGCCTCTGTCAAG |
| | | | | | | | GAGTGGAC |
| | | | | | | | (SEQ ID NO: 5610) |
| | | | | | | | AGGAGTGGACAATCACC |
| | | | | | | | TACTGAGG |
| | | | | | | | (SEQ ID NO: 5611) |
| | | | | | | | CCGCCTCTGGATGGACC |
| | | | | | | | GAATCAGG |
| | | | | | | | (SEQ ID NO: 5612) |
| | | | | | | | AACTGCAGCGGAACATG |
| | | | | | | | TCATTTCT |
| | | | | | | | (SEQ ID NO: 5613) |
| | | | | | | | TCGTCTCTGCAGGGTGT |
| | | | | | | | CTGTACAC |
| | | | | | | | (SEQ ID NO: 5614) |
| 210154_at | ME2 | 0 | malic enzyme 2, | chr6p25- | Loss_{—} | 4200 | CCAGGTGTGGCTTTAGC |
| | | | NAD(+)- | p24\|18q21 | down | | TGTTATTC |
| | | | dependent, | | | | (SEQ ID NO: 5615) |
| | | | mitochondrial | | | | GTGGCTTTAGCTGTTAT |
| | | | | | | | TCTCTGTA |
| | | | | | | | (SEQ ID NO: 5616) |
| | | | | | | | TATTCTCTGTAACACCC |
| | | | | | | | GGCATATT |
| | | | | | | | (SEQ ID NO: 5617) |
| | | | | | | | ACCCGGCATATTAGTGA |
| | | | | | | | CAGTGTTT |
| | | | | | | | (SEQ ID NO: 5618) |
| | | | | | | | GACAGTGTTTTCCTAGA |
| | | | | | | | AGCTGCAA |
| | | | | | | | (SEQ ID NO: 5619) |
| | | | | | | | AGCTGCAAAGGCCCTGA |
| | | | | | | | CAAGCCAA |
| | | | | | | | (SEQ ID NO: 5620) |
| | | | | | | | AGGCCCTGACAAGCCAA |
| | | | | | | | TTGACAGA |
| | | | | | | | (SEQ ID NO: 5621) |
| | | | | | | | AATTGACAGATGAAGAG |
| | | | | | | | CTAGCCCA |
| | | | | | | | (SEQ ID NO: 5622) |
| | | | | | | | GCTAGCCCAAGGGAGAC |
| | | | | | | | TTTACCCA |
| | | | | | | | (SEQ ID NO: 5623) |
| | | | | | | | TACCCACCGCTTGCTAA |
| | | | | | | | TATTCAGG |
| | | | | | | | (SEQ ID NO: 5624) |
| | | | | | | | GGAAGTTTCTATTAACA |
| | | | | | | | TTGCTATT |
| | | | | | | | (SEQ ID NO: 5625) |
| 217875_s_at | TMEPAI | PMEPA1, | prostate | chr20q13. | Gain_{—} | 56937 | CCCCAAACAGAACCATC |
| | | STAG1 | trans- | 31-q13.33 | up | | TTCGACAG |
| | | | membrane | | | | (SEQ ID NO: 5626) |
| | | | protein, | | | | ATCTTCGACAGTGACCT |
| | | | androgen | | | | GATGGATA |
| | | | induced 1 | | | | (SEQ ID NO: 5627) |
| | | | | | | | GATGGATAGTGCCAGGC |
| | | | | | | | TGGGCGGC |
| | | | | | | | (SEQ ID NO: 5628) |
| | | | | | | | CGGCGGGCGCATGGAGG |
| | | | | | | | GGCCGCCG |
| | | | | | | | (SEQ ID NO: 5629) |
| | | | | | | | CCTAGAGAGCGCAGCCA |
| | | | | | | | TCTGGAGC |
| | | | | | | | (SEQ ID NO: 5630) |
| | | | | | | | AACAGAAAGGACACCCT |
| | | | | | | | CTCTAGGG |
| | | | | | | | (SEQ ID NO: 5631) |
| | | | | | | | GGCTGGGGCTGCGTAGG |
| | | | | | | | TGAAAAGG |
| | | | | | | | (SEQ ID NO: 5632) |
| | | | | | | | TGAAAAGGCAGAACACT |
| | | | | | | | CCGCGCTT |
| | | | | | | | (SEQ ID NO: 5633) |
| | | | | | | | GTGAGAGGAAGGCGGGG |
| | | | | | | | GGCGCAGC |
| | | | | | | | (SEQ ID NO: 5634) |
| | | | | | | | AAACCACGTTTCTTTGT |
| | | | | | | | TGAGCTGT |
| | | | | | | | (SEQ ID NO: 5635) |
| | | | | | | | GTTGAGCTGTGTCTTGA |
| | | | | | | | AGGCAAAA |
| | | | | | | | (SEQ ID NO: 5636) |
| 218435_at | DNAJC15 | MCJ; | DnaJ (Hsp40) | chr13q14.1 | Gain_{—} | 29103 | CCGACGTCGACCAGCAG |
| | | HSD18; | homolog, | | up | | GGACTGGT |
| | | DNAJD1 | subfamily C, | | | | (SEQ ID NO: 5637) |
| | | | member 15 | | | | GATAGCTGTAGGACTGG |
| | | | | | | | GTGTTGCA |
| | | | | | | | (SEQ ID NO: 5638) |
| | | | | | | | GGTGTTGCAGCTCTTGC |
| | | | | | | | ATTTGCAG |
| | | | | | | | (SEQ ID NO: 5639) |
| | | | | | | | GCATTTGCAGGTCGCTA |
| | | | | | | | CGCATTTC |
| | | | | | | | (SEQ ID NO: 5640) |
| | | | | | | | ACGCATTTCGGATCTGG |
| | | | | | | | AAACCTCT |
| | | | | | | | (SEQ ID NO: 5641) |
| | | | | | | | GAAGATTTCAACTCCTA |
| | | | | | | | GCTTTTCA |
| | | | | | | | (SEQ ID NO: 5642) |
| | | | | | | | TTTAGGTGTAAGCCCAT |
| | | | | | | | CTGCTGGC |
| | | | | | | | (SEQ ID NO: 5643) |
| | | | | | | | TGGATCTCCTTACGTAG |
| | | | | | | | CAGCCAAA |
| | | | | | | | (SEQ ID NO: 5644) |
| | | | | | | | ACATGGTCTTCTTAATT |
| | | | | | | | TTCTATAT |
| | | | | | | | (SEQ ID NO: 5645) |
| | | | | | | | TGGATTGACCACAGTCT |
| | | | | | | | TATCTTCC |
| | | | | | | | (SEQ ID NO: 5646) |
| | | | | | | | GTCTTATCTTCCACCAT |
| | | | | | | | TAAGCTGT |
| | | | | | | | (SEQ ID NO: 5647) |
| 213738_s_at | ATP5A1 | ATP5A, | ATP synthase, | chr18q12- | Loss_{—} | 498 | CGCCCTGCAATTAACGT |
| | | ATP5AL2, | H+ | q21 | down | | TGGTCTGT |
| | | ATPM, | transporting, | | | | (SEQ ID NO: 5648) |
| | | MOM2, | mitochondrial | | | | TCCGCTGCCCAAACCAG |
| | | OMR, ORM, | F1 complex, | | | | GGCTATGA |
| | | hATP1 | alpha | | | | (SEQ ID NO: 5649) |
| | | | subunit 1, | | | | GAAGCTGGAATTGGCT |
| | | | cardiac muscle | | | | CAGTATCGT |
| | | | | | | | (SEQ ID NO: 5650) |
| | | | | | | | GTATCGTGAGGTTGCTG |
| | | | | | | | CTTTTGCC |
| | | | | | | | (SEQ ID NO: 5651) |
| | | | | | | | AACTTTTGAGTCGTGGC |
| | | | | | | | GTGCGTCT |
| | | | | | | | (SEQ ID NO: 5652) |
| | | | | | | | GGCGTGCGTCTAACTGA |
| | | | | | | | GTTGCTGA |
| | | | | | | | (SEQ ID NO: 5653) |
| | | | | | | | CAGTATTCTCCCATGGC |
| | | | | | | | TATTGAAG |
| | | | | | | | (SEQ ID NO: 5654) |
| | | | | | | | AAGTGGCTGTTATCTAT |
| | | | | | | | GCGGGTGT |
| | | | | | | | (SEQ ID NO: 5655) |
| | | | | | | | GCACCAAGCCTTGTTGG |
| | | | | | | | GCACTATC |
| | | | | | | | (SEQ ID NO: 5656) |
| | | | | | | | AGCTTAAACTCCTGTGG |
| | | | | | | | ATTCACAT |
| | | | | | | | (SEQ ID NO: 5657) |
| | | | | | | | GTTCAGTTTTGTCATTG |
| | | | | | | | TTCTAGTA |
| | | | | | | | (SEQ ID NO: 5658) |
| 206134_at | ADAMDE | M12.219 | ADAM-like, | chr8p21.2 | Loss_{—} | 27299 | CTTTCTATATTGTTATC |
| | C1 | | decysin 1 | | down | | AGTCCAGG |
| | | | | | | | (SEQ ID NO: 5659) |
| | | | | | | | GACATTGGCTCTTTGTT |
| | | | | | | | TAGGCCTA |
| | | | | | | | (SEQ ID NO: 5660) |
| | | | | | | | GAATTTGTGACTTAGTT |
| | | | | | | | CTGCCCTT |
| | | | | | | | (SEQ ID NO: 5661) |
| | | | | | | | GAAAGCAGTCTTCCATC |
| | | | | | | | AAATCACC |
| | | | | | | | (SEQ ID NO: 5662) |
| | | | | | | | AATGCACGGCTAAACTA |
| | | | | | | | TTCAGAGT |
| | | | | | | | (SEQ ID NO: 5663) |
| | | | | | | | AAGTACTATGCTTTAAT |
| | | | | | | | GCTTCTTT |
| | | | | | | | (SEQ ID NO: 5664) |
| | | | | | | | GCTTCTTTCATCTTACT |
| | | | | | | | AGTATGGC |
| | | | | | | | (SEQ ID NO: 5665) |
| | | | | | | | TATGTTATTCCTCTGTG |
| | | | | | | | TTCACTTC |
| | | | | | | | (SEQ ID NO: 5666) |
| | | | | | | | ACTTCGCCTTGCTCTTG |
| | | | | | | | AAAGTGCA |
| | | | | | | | (SEQ ID NO: 5667) |
| | | | | | | | GTATATCCTATACACAC |
| | | | | | | | ATCTCCTT |
| | | | | | | | (SEQ ID NO: 5668) |
| | | | | | | | TGAGAAGTCTACATTGC |
| | | | | | | | TTACATTT |
| | | | | | | | (SEQ ID NO: 5669) |
| 204386_s_at | MRP63 | MGC3243, | mitochondrial | chr13q12.11 | Gain_{—} | 78988 | GAAATGGTCCTAATCCT |
| | | bMRP63 | ribosomal | | up | | GAGTCGTC |
| | | | protein 63 | | | | (SEQ ID NO: 5670) |
| | | | | | | | TGAGTCGTCACCCTTGG |
| | | | | | | | ATTTTATG |
| | | | | | | | (SEQ ID NO: 5671) |
| | | | | | | | ATGGATCACGGAGCTGA |
| | | | | | | | CCATCTTT |
| | | | | | | | (SEQ ID NO: 5672) |
| | | | | | | | GACCATCTTTACCTGGT |
| | | | | | | | CCTGGAAC |
| | | | | | | | (SEQ ID NO: 5673) |
| | | | | | | | GAAAATGAGCCTTTGGA |
| | | | | | | | CCAGTCTT |
| | | | | | | | (SEQ ID NO: 5674) |
| | | | | | | | GAGCCTTTGGACCAGTC |
| | | | | | | | TTTATTAA |
| | | | | | | | (SEQ ID NO: 5675) |
| | | | | | | | TGAGTAGTCTGCATATC |
| | | | | | | | GAATATCT |
| | | | | | | | (SEQ ID NO: 5676) |
| | | | | | | | GAATATCTAGAGCTCTA |
| | | | | | | | AACCCCCC |
| | | | | | | | (SEQ ID NO: 5677) |
| | | | | | | | GTCCTGTGGTTTCATTA |
| | | | | | | | GTCTGATA |
| | | | | | | | (SEQ ID NO: 5678) |
| | | | | | | | AGGGATTTCCTCAGTCA |
| | | | | | | | CAGATGAT |
| | | | | | | | (SEQ ID NO: 5679) |
| | | | | | | | GGAAAGCTGCAATAAAG |
| | | | | | | | CCACAATG |
| | | | | | | | (SEQ ID NO: 5680) |
| 209368_at | EPHX2 | CEH, SEH | epoxide | chr8p21-p12 | Loss_{—} | 2053 | GAACAGAACCTGAGTCG |
| | | | hydrolase 2, | | down | | TCGGACTT |
| | | | cytoplasmic | | | | (SEQ ID NO: 5681) |
| | | | | | | | GGACTTTCAAAAGCCTC |
| | | | | | | | TTCAGAGC |
| | | | | | | | (SEQ ID NO: 5682) |
| | | | | | | | GAGGAAATCCAGTTCT |
| | | | | | | | ATGTGCAGC |
| | | | | | | | (SEQ ID NO: 5683) |
| | | | | | | | CAGAGGTCCTCTAAACT |
| | | | | | | | GGTACCGA |
| | | | | | | | (SEQ ID NO: 5684) |
| | | | | | | | GGACGGAAGATCCTGAT |
| | | | | | | | TCCGGCCC |
| | | | | | | | (SEQ ID NO: 5685) |
| | | | | | | | GCCCTGATGGTCACGGC |
| | | | | | | | GGAGAAGG |
| | | | | | | | (SEQ ID NO: 5686) |
| | | | | | | | CGGAGAAGGACTTCGTG |
| | | | | | | | CTCGTTCC |
| | | | | | | | (SEQ ID NO: 5687) |
| | | | | | | | GCACATGGAGGACTGGA |
| | | | | | | | TTCCCCAC |
| | | | | | | | (SEQ ID NO: 5688) |
| | | | | | | | TGGCTGGATTCTGATGC |
| | | | | | | | CCGGAACC |
| | | | | | | | (SEQ ID NO: 5689) |
| | | | | | | | GGAACCCACCGGTGGTC |
| | | | | | | | TCAAAGAT |
| | | | | | | | (SEQ ID NO: 5690) |
| | | | | | | | GTAGAACGCAGCGTGTG |
| | | | | | | | CCCACGCT |
| | | | | | | | (SEQ ID NO: 5691) |
| 206790_s_at | NDUFB1 | CI-SGDH, | NADH | chr14q32.12 | Loss_{—} | 4707 | GAACTTACTTCAGATTG |
| | | MNLL | dehydrogenase | | down | | TGCGGGAC |
| | | | (ubiquinone) 1 | | | | (SEQ ID NO: 5692) |
| | | | beta | | | | CAGATTGTGCGGGACCA |
| | | | subcomplex, | | | | CTGGGTTC |
| | | | 1, 7 kDa | | | | (SEQ ID NO: 5693) |
| | | | | | | | GGACCACTGGGTTCATG |
| | | | | | | | TTCTTGTC |
| | | | | | | | (SEQ ID NO: 5694) |
| | | | | | | | CTGGGTTCATGTTCTTG |
| | | | | | | | TCCCTATG |
| | | | | | | | (SEQ ID NO: 5695) |
| | | | | | | | TGTCCCTATGGGATTTG |
| | | | | | | | TCATTGGA |
| | | | | | | | (SEQ ID NO: 5696) |
| | | | | | | | GTGATGAACGGCTAACT |
| | | | | | | | GCCTTCCG |
| | | | | | | | (SEQ ID NO: 5697) |
| | | | | | | | GCTAACTGCCTTCCGGA |
| | | | | | | | ACAAGAGT |
| | | | | | | | (SEQ ID NO: 5698) |
| | | | | | | | ACTGCCTTCCGGAACAA |
| | | | | | | | GAGTATGT |
| | | | | | | | (SEQ ID NO: 5699) |
| | | | | | | | AAAGGGAATTGCAACCC |
| | | | | | | | AGTGAAGA |
| | | | | | | | (SEQ ID NO: 5700) |
| | | | | | | | GACTGGCTAGATTATCG |
| | | | | | | | AATGTTCA |
| | | | | | | | (SEQ ID NO: 5701) |
| | | | | | | | GTTCACATTTTAAAGTT |
| | | | | | | | CTGAGAGA |
| | | | | | | | (SEQ ID NO: 5702) |
| 204149_s_at | GSTM4 | GSTM4-4, | glutathione | chr1p13.3 | Loss_{—} | 2948 | GAGAACCAGGCTATGGA |
| | | GTM4, | S-transferase | | down | | CGTCTCCA |
| | | MGC131945, | M4 | | | | (SEQ ID NO: 5703) |
| | | MGC9247 | | | | | CAGGCTATGGACGTCTC |
| | | | | | | | CAATCAGC |
| | | | | | | | (SEQ ID NO: 5704) |
| | | | | | | | CTATGGACGTCTCCAAT |
| | | | | | | | CAGCTGGC |
| | | | | | | | (SEQ ID NO: 5705) |
| | | | | | | | CTCCAATCAGCTGGCCA |
| | | | | | | | GAGTCTGC |
| | | | | | | | (SEQ ID NO: 5706) |
| | | | | | | | TCTGCTACAGCCCTGAC |
| | | | | | | | TTTGAGAA |
| | | | | | | | (SEQ ID NO: 5707) |
| | | | | | | | GCTACAGCCCTGACTTT |
| | | | | | | | GAGAAACT |
| | | | | | | | (SEQ ID NO: 5708) |
| | | | | | | | ATACTTGGAGGAACTTC |
| | | | | | | | CTACAATG |
| | | | | | | | (SEQ ID NO: 5709) |
| | | | | | | | GAGGAACTTCCTACAAT |
| | | | | | | | GATGCAGC |
| | | | | | | | (SEQ ID NO: 5710) |
| | | | | | | | GGAACTTCCTACAATGA |
| | | | | | | | TGCAGCAC |
| | | | | | | | (SEQ ID NO: 5711) |
| | | | | | | | ACTTCCTACAATGATGC |
| | | | | | | | AGCACTTC |
| | | | | | | | (SEQ ID NO: 5712) |
| | | | | | | | GAAGAGGCCATGGTTTG |
| | | | | | | | TTGGAGAC |
| | | | | | | | (SEQ ID NO: 5713) |
| 208909_at | UQCRFS1 | RIP1, | ubiquinol- | chr19q12- | Loss_{—} | 7386 | GAGAGGCAAACCCCTGT |
| | | RIS1, | cytochrome c | q13.1 | down | | TTGTGCGT |
| | | RISP, | reductase, | | | | (SEQ ID NO: 5714) |
| | | UQCR5 | Rieske | | | | CTGTTTGTGCGTCATAG |
| | | | iron-sulfur | | | | AACCCAGA |
| | | | polypeptide 1 | | | | (SEQ ID NO: 5715) |
| | | | | | | | GGACCCACAGCATGATC |
| | | | | | | | TAGATCGA |
| | | | | | | | (SEQ ID NO: 5716) |
| | | | | | | | GATAGGTGTTTGCACTC |
| | | | | | | | ATCTTGGC |
| | | | | | | | (SEQ ID NO: 5717) |
| | | | | | | | TCATCTTGGCTGTGTAC |
| | | | | | | | CCATTGCA |
| | | | | | | | (SEQ ID NO: 5718) |
| | | | | | | | TTTTGGTGGTTATTACT |
| | | | | | | | GCCCTTGC |
| | | | | | | | (SEQ ID NO: 5719) |
| | | | | | | | GGGTCACACTATGATGC |
| | | | | | | | ATCTGGCA |
| | | | | | | | (SEQ ID NO: 5720) |
| | | | | | | | CAGGATCAGATTGGGTC |
| | | | | | | | CTGCTCCT |
| | | | | | | | (SEQ ID NO: 5721) |
| | | | | | | | TGAAGTCCCCACGTATG |
| | | | | | | | AGTTCACC |
| | | | | | | | (SEQ ID NO: 5722) |
| | | | | | | | GGACTCAAGTCATAGGC |
| | | | | | | | TTCTTTCA |
| | | | | | | | (SEQ ID NO: 5723) |
| | | | | | | | GGCTTCTTTCAGTCTTT |
| | | | | | | | ATGTCACC |
| | | | | | | | (SEQ ID NO: 5724) |
| 221432_s_at | SLC25A | MFRN2; | solute carrier | chr10q23- | Loss_{—} | 81894 | GCAGATGTACAACTCAC |
| | 28 | MRS4L; | family 25, | q24 | down | | CATACCAC |
| | | MRS3/4; | member 28 | | | | (SEQ ID NO: 5725) |
| | | NPD016; | | | | | AATTCCTGCAGGAGCAC |
| | | DKFZp547C | | | | | TTTAACCC |
| | | 109 | | | | | (SEQ ID NO: 5726) |
| | | | | | | | CCAGAGACGGTACAACC |
| | | | | | | | CAAGCTCC |
| | | | | | | | (SEQ ID NO: 5727) |
| | | | | | | | TTGCGCAGGAGCTGTA |
| | | | | | | | GCTGCCGCA |
| | | | | | | | (SEQ ID NO: 5728) |
| | | | | | | | CACAACCCCACTGGACG |
| | | | | | | | TTTGCAAA |
| | | | | | | | (SEQ ID NO: 5729) |
| | | | | | | | TTGCAAAACACTGCTCA |
| | | | | | | | ACACCCAG |
| | | | | | | | (SEQ ID NO: 5730) |
| | | | | | | | CACCCAGGAGTCCTTGG |
| | | | | | | | CTTTGAAC |
| | | | | | | | (SEQ ID NO: 5731) |
| | | | | | | | GCATGGCTAGTGCCTTC |
| | | | | | | | AGGACGGT |
| | | | | | | | (SEQ ID NO: 5732) |
| | | | | | | | CAAGTAGGTGGGGTGAC |
| | | | | | | | CGCCTATT |
| | | | | | | | (SEQ ID NO: 5733) |
| | | | | | | | ATTTCCGAGGGGTGCAG |
| | | | | | | | GCCAGAGT |
| | | | | | | | (SEQ ID NO: 5734) |
| | | | | | | | AGCCATCGCATGGTCTG |
| | | | | | | | TGTATGAG |
| | | | | | | | (SEQ ID NO: 5735) |
| 211755_s_at | ATP5F1 | MGC24431, | ATP synthase, | chr1p13.2 | Loss_{—} | 515 | GCCTGGACTATCATATA |
| | | PIG47 | H+ transporting, | | down | | TCTGTGCA |
| | | | mitochondrial F0 | | | | (SEQ ID NO: 5736) |
| | | | complex, subunit | | | | ATCTGTGCAGAACATGA |
| | | | B1 | | | | TGCGTCGA |
| | | | | | | | (SEQ ID NO: 5737) |
| | | | | | | | AAGCACGTGGTGCAAAG |
| | | | | | | | CATCTCCA |
| | | | | | | | (SEQ ID NO: 5738) |
| | | | | | | | GACAATTGCCAAGTGCA |
| | | | | | | | TTGCGGAC |
| | | | | | | | (SEQ ID NO: 5739) |
| | | | | | | | GCATTGCGGACCTAAAG |
| | | | | | | | CTGCTGGC |
| | | | | | | | (SEQ ID NO: 5740) |
| | | | | | | | GAAGGCTCAAGCACAGC |
| | | | | | | | CAGTTATG |
| | | | | | | | (SEQ ID NO: 5741) |
| | | | | | | | TGACAAAGTCTTTCTGT |
| | | | | | | | GTTGGTGT |
| | | | | | | | (SEQ ID NO: 5742) |
| | | | | | | | GAACGAAATCTCTATCG |
| | | | | | | | GCCAGTCA |
| | | | | | | | (SEQ ID NO: 5743) |
| | | | | | | | ATCGGCCAGTCAGATGT |
| | | | | | | | TTCTCATC |
| | | | | | | | (SEQ ID NO: 5744) |
| | | | | | | | AAACTTGCTGCCTGACT |
| | | | | | | | AAAGATTA |
| | | | | | | | (SEQ ID NO: 5745) |
| | | | | | | | AATTAATTCTACCATCT |
| | | | | | | | TGCAATAA |
| | | | | | | | (SEQ ID NO: 5746) |
| 214937_x_at | PCM1 | CXXC3, | pericentriolar | chr8p22- | Loss_{—} | 5108 | GGAAGTCCTGATACTGA |
| | | PCM1, RFT | material 1 | p21.3 | down | | ATCTCCAG |
| | | | | | | | (SEQ ID NO: 5747) |
| | | | | | | | GAATCTCCAGTGTTAGT |
| | | | | | | | GAATGACT |
| | | | | | | | (SEQ ID NO: 5748) |
| | | | | | | | GAAGATTTACCACTGAA |
| | | | | | | | ACTGACAA |
| | | | | | | | (SEQ ID NO: 5749) |
| | | | | | | | GAACCTGAAACGGTGGG |
| | | | | | | | AGCCCAGA |
| | | | | | | | (SEQ ID NO: 5750) |
| | | | | | | | GGGAGCCCAGAGTATAT |
| | | | | | | | GAGATGTC |
| | | | | | | | (SEQ ID NO: 5751) |
| | | | | | | | ATGTCTTCAGAGGCTCA |
| | | | | | | | TCTAACTC |
| | | | | | | | (SEQ ID NO: 5752) |
| | | | | | | | CATCTAACTCTGTCCTT |
| | | | | | | | ACATACTC |
| | | | | | | | (SEQ ID NO: 5753) |
| | | | | | | | GTTTGACACTGCTTTTT |
| | | | | | | | TGATAGGT |
| | | | | | | | (SEQ ID NO: 5754) |
| | | | | | | | TGATAGGTGTGGTCATT |
| | | | | | | | TCTCCCCA |
| | | | | | | | (SEQ ID NO: 5755) |
| | | | | | | | GATTTAAGCCTTGACAC |
| | | | | | | | ACTGTGTT |
| | | | | | | | (SEQ ID NO: 5756) |
| | | | | | | | ATTTTTTTCCCCATTGT |
| | | | | | | | GATGTTTG |
| | | | | | | | (SEQ ID NO: 5757) |
| 206441_s_at | COMMD4 | FLJ20452 | COMM domain | chr15q24.2 | Loss_{—} | 54939 | GGAGCTGCTGGGACAGG |
| | | | containing 4 | | down | | GGATTGAT |
| | | | | | | | (SEQ ID NO: 5758) |
| | | | | | | | AGCTCACGGCTGACGCC |
| | | | | | | | AAGTTTGA |
| | | | | | | | (SEQ ID NO: 5759) |
| | | | | | | | TCCAGTGCGGCCAAGCA |
| | | | | | | | CAGTGTCG |
| | | | | | | | (SEQ ID NO: 5760) |
| | | | | | | | AGTGTCGATGGCGAATC |
| | | | | | | | CTTGTCCA |
| | | | | | | | (SEQ ID NO: 5761) |
| | | | | | | | TCCTTGTCCAGTGAACT |
| | | | | | | | GCAGCAGC |
| | | | | | | | (SEQ ID NO: 5762) |
| | | | | | | | AGCTGGGGCTGCCCAAA |
| | | | | | | | GAGCACGC |
| | | | | | | | (SEQ ID NO: 5763) |
| | | | | | | | CCAGCCTGTGCCGCTGT |
| | | | | | | | TATGAGGA |
| | | | | | | | (SEQ ID NO: 5764) |
| | | | | | | | CAAAGCCCCTTGCAGAA |
| | | | | | | | GCACTTGC |
| | | | | | | | (SEQ ID NO: 5765) |
| | | | | | | | TGAACTGCTCTTCGGGA |
| | | | | | | | GGCAGCCC |
| | | | | | | | (SEQ ID NO: 5766) |
| | | | | | | | GCCCTGGTTCTAGGATG |
| | | | | | | | CTGAGGCC |
| | | | | | | | (SEQ ID NO: 5767) |
| | | | | | | | GCCTCACTTCTCTCTTG |
| | | | | | | | AGAACTTG |
| | | | | | | | (SEQ ID NO: 5768) |
| 219303_at | C13 | RNF219; | ring finger | chr13q31.1 | Gain_{—} | 79596 | GGCATGGAGCACTTGGG |
| | orf7 | FLJ13449; | protein 219 | | up | | TTTAGAGG |
| | | FLJ25774; | | | | | (SEQ ID NO: 5769) |
| | | DKFZp686A | | | | | AAAACATCATAGCTTCA |
| | | 01276; | | | | | TTGTTCCA |
| | | DKFZp686N | | | | | (SEQ ID NO: 5770) |
| | | 15250; | | | | | GCTTCATTGTTCCAGAT |
| | | DKFZp686O | | | | | GTAACAGG |
| | | 03173 | | | | | (SEQ ID NO: 5771) |
| | | | | | | | CATTCCAGGGGAGTTTT |
| | | | | | | | CTTTTGAG |
| | | | | | | | (SEQ ID NO: 5772) |
| | | | | | | | TTTGCATGTTCCTGTTC |
| | | | | | | | TTTGTGGA |
| | | | | | | | (SEQ ID NO: 5773) |
| | | | | | | | TCCTGTTCTTTGTGGAA |
| | | | | | | | ACTATGCA |
| | | | | | | | (SEQ ID NO: 5774) |
| | | | | | | | TTTTGCTTGCTGTGTTT |
| | | | | | | | TCCATACT |
| | | | | | | | (SEQ ID NO: 5775) |
| | | | | | | | ATGTAGGACAAAACTTTT |
| | | | | | | | CTGTGAA |
| | | | | | | | (SEQ ID NO: 5776) |
| | | | | | | | CGTATTTGGTATGCCTA |
| | | | | | | | TATAGGTC |
| | | | | | | | (SEQ ID NO: 5777) |
| | | | | | | | AATGGGTTTGTATGCTG |
| | | | | | | | TTTAATGT |
| | | | | | | | (SEQ ID NO: 5778) |
| | | | | | | | GTATGCTGTTTAATGTG |
| | | | | | | | CACTGAAC |
| | | | | | | | (SEQ ID NO: 5779) |
| 210107_at | CLCA1 | CACC, | CLCA family | chr1p31-p22 | Loss_{—} | 1179 | GGCCAAATCACCGACCT |
| | | CACC1, | member 1, | | down | | GAAGGCGG |
| | | CLCRG1, | chloride | | | | (SEQ ID NO: 5780) |
| | | FLJ95147, | channel | | | | TTCACGGGGGCAGTCT |
| | | GOB5 | regulator | | | | CATTAATCT |
| | | | | | | | (SEQ ID NO: 5781) |
| | | | | | | | GACTTGGACAGCTCCTG |
| | | | | | | | GGGATGAT |
| | | | | | | | (SEQ ID NO: 5782) |
| | | | | | | | CAAGTGAATACTACTGC |
| | | | | | | | TCTCATCC |
| | | | | | | | (SEQ ID NO: 5783) |
| | | | | | | | GGCACAGATCTTTTCA |
| | | | | | | | TTGCTATTC |
| | | | | | | | (SEQ ID NO: 5784) |
| | | | | | | | ATCTTTGTTTATTCCTC |
| | | | | | | | CACAGACT |
| | | | | | | | (SEQ ID NO: 5785) |
| | | | | | | | CGCCAGAGACACCTAGT |
| | | | | | | | CCTGATGA |
| | | | | | | | (SEQ ID NO: 5786) |
| | | | | | | | TAGTCCTGATGAAACGT |
| | | | | | | | CTGCTCCT |
| | | | | | | | (SEQ ID NO: 5787) |
| | | | | | | | TCTGCTCCTTGTCCTAA |
| | | | | | | | TATTCATA |
| | | | | | | | (SEQ ID NO: 5788) |
| | | | | | | | TATCAACAGCACCATTC |
| | | | | | | | CTGGCATT |
| | | | | | | | (SEQ ID NO: 5789) |
| | | | | | | | ACTGCAGCTGTCAATAG |
| | | | | | | | CCTAGGGC |
| | | | | | | | (SEQ ID NO: 5790) |
| 218801_at | UGCGL2 | RP11- | UDP-glucose | chr13q32.1 | Gain_{—} | 55757 | GGCTCAGGAGCCAGTAT |
| | | 31K22.2, | ceramide | | up | | CAAGCTCT |
| | | FLJ10873, | glucosyl- | | | | (SEQ ID NO: 5791) |
| | | FLJ11485, | transferase- | | | | AAGCTCTCAGTCAAGA |
| | | HUGT2, | like 2 | | | | TCCAAACAG |
| | | MGC117360, | | | | | (SEQ ID NO: 5792) |
| | | MGC150689, | | | | | GATCCAAACAGTCTTTC |
| | | MGC87276 | | | | | AAACCTAG |
| | | | | | | | (SEQ ID NO: 5793) |
| | | | | | | | AGATCAGGATCTCCCCA |
| | | | | | | | ATAATATG |
| | | | | | | | (SEQ ID NO: 5794) |
| | | | | | | | TACCAAGTCGCCATTAA |
| | | | | | | | GTCTCTTC |
| | | | | | | | (SEQ ID NO: 5795) |
| | | | | | | | TCTTCCTCAAGACTGGC |
| | | | | | | | TGTGGTGT |
| | | | | | | | (SEQ ID NO: 5796) |
| | | | | | | | GAATCCAAACTAAAAGC |
| | | | | | | | TGCTGCCA |
| | | | | | | | (SEQ ID NO: 5797) |
| | | | | | | | CTGCCAGAATTGTCCCA |
| | | | | | | | GAATGGGT |
| | | | | | | | (SEQ ID NO: 5798) |
| | | | | | | | GACACATGATGAACTCT |
| | | | | | | | AGCACTGG |
| | | | | | | | (SEQ ID NO: 5799) |
| | | | | | | | TGCTGGGGAAGTCTGGA |
| | | | | | | | GCCCCTGC |
| | | | | | | | (SEQ ID NO: 5800) |
| | | | | | | | AGCCCCTGCTGAGACGA |
| | | | | | | | TTTGGAAG |
| | | | | | | | (SEQ ID NO: 5801) |
| 203478_at | NDUFC1 | KFYI; | NADH | chr4q28.2- | Loss_{—} | 4717 | GGGGCCCAAGGAATTCG |
| | | MGC117464; | dehydrogenase | q31.1 | down | | CAAGATGG |
| | | MGC126847; | (ubiquinone) 1, | | | | (SEQ ID NO: 5802) |
| | | MGC138266 | subcomplex | | | | AGGAATTCGCAAGATG |
| | | | unknown, 1, | | | | GCGCCGTCC |
| | | | 6 kDa | | | | (SEQ ID NO: 5803) |
| | | | | | | | GCCCTTCAGTGCGATCA |
| | | | | | | | AAGTTCTA |
| | | | | | | | (SEQ ID NO: 5804) |
| | | | | | | | GTGCGATCAAAGTTCTA |
| | | | | | | | CGTGCGAG |
| | | | | | | | (SEQ ID NO: 5805) |
| | | | | | | | TTCTACGTGCGAGAGCC |
| | | | | | | | GCCGAATG |
| | | | | | | | (SEQ ID NO: 5806) |
| | | | | | | | CCGCCGAATGCCAAACC |
| | | | | | | | TGACTGGC |
| | | | | | | | (SEQ ID NO: 5807) |
| | | | | | | | ACCTGACTGGCTGAAAG |
| | | | | | | | TTGGGTTC |
| | | | | | | | (SEQ ID NO: 5808) |
| | | | | | | | TGAAAGTTGGGTTCACC |
| | | | | | | | TTGGGCAC |
| | | | | | | | (SEQ ID NO: 5809) |
| | | | | | | | GTCTTCTTGTGGATCTA |
| | | | | | | | TCTCATCA |
| | | | | | | | (SEQ ID NO: 5810) |
| | | | | | | | GGATCTATCTCATCAAA |
| | | | | | | | CAACACAA |
| | | | | | | | (SEQ ID NO: 5811) |
| | | | | | | | CAAGCCAGCATTTGTAT |
| | | | | | | | TTTGCATC |
| | | | | | | | (SEQ ID NO: 5812) |
| 218738_s_at | RNF138 | HSD-4, | ring finger | chr18q12.1 | Loss_{—} | 51444 | GGGGGTTGAAGTGTTTA |
| | | MGC8758, | protein 138 | | down | | TCTGATTT |
| | | NARF, | | | | | (SEQ ID NO: 5813) |
| | | STRIN | | | | | AGTGCTAAGTTATCTAG |
| | | | | | | | TTGGCTAC |
| | | | | | | | (SEQ ID NO: 5814) |
| | | | | | | | TAGTTGGCTACTATTAC |
| | | | | | | | ACCTTAAA |
| | | | | | | | (SEQ ID NO: 5815) |
| | | | | | | | ACAATTACCTGTTTATA |
| | | | | | | | TGGGCTC |
| | | | | | | | (SEQ ID NO: 5816) |
| | | | | | | | TATGGTGCTCATTTGTT |
| | | | | | | | ATTCTCAA |
| | | | | | | | (SEQ ID NO: 5817) |
| | | | | | | | GAGAAAGATTCTACCAA |
| | | | | | | | CCACTGTT |
| | | | | | | | (SEQ ID NO: 5818) |
| | | | | | | | TACCAACCACTGTTCAC |
| | | | | | | | TACTTT |
| | | | | | | | (SEQ ID NO: 5819) |
| | | | | | | | GTAGAAGGCCCAAATCA |
| | | | | | | | CAGAATAA |
| | | | | | | | (SEQ ID NO: 5820) |
| | | | | | | | GGATTTGCTGACATTCC |
| | | | | | | | ATACTAAT |
| | | | | | | | (SEQ ID NO: 5821) |
| | | | | | | | GAATCTCAGAAGTAGTT |
| | | | | | | | TGCTGCTA |
| | | | | | | | (SEQ ID NO: 5822) |
| | | | | | | | AACCCTTGTTGACTTTT |
| | | | | | | | CTACACTG |
| | | | | | | | (SEQ ID NO: 5823) |
| 202956_at | ARFGEF | ARFGEP1, | ADP-ribosylation | chr8q13 | Gain_{—} | 10565 | GGTAGGTGGTGATTTTG |
| | 1 | BIG1, | factor guanine | | up | | AGGCTGTA |
| | | D730028O1 | nucleotide- | | | | (SEQ ID NO: 5824) |
| | | 8Rik, | exchange factor | | | | TGAGGCTGTAACATGCC |
| | | DKFZP434L | 1(brefeldin A- | | | | CAGAAGCT |
| | | 057, P200 | inhibited) | | | | (SEQ ID NO: 5825) |
| | | | | | | | GAAGCTGTTGTGGCCGA |
| | | | | | | | CACTTCAA |
| | | | | | | | (SEQ ID NO: 5826) |
| | | | | | | | GTGGCCGACACTTCAAC |
| | | | | | | | AATAGGGA |
| | | | | | | | (SEQ ID NO: 5827) |
| | | | | | | | ATATCCCTACTGACAGT |
| | | | | | | | AACTACCT |
| | | | | | | | (SEQ ID NO: 5828) |
| | | | | | | | GTAACTACCTGTCACAT |
| | | | | | | | ATTTCTCT |
| | | | | | | | (SEQ ID NO: 5829) |
| | | | | | | | CTTTTGGGTGGTGGGGC |
| | | | | | | | TTGATGTA |
| | | | | | | | (SEQ ID NO: 5830) |
| | | | | | | | GGCATGGTTTGCGGAGG |
| | | | | | | | TTAGATTT |
| | | | | | | | (SEQ ID NO: 5831) |
| | | | | | | | GTGAATTGTGCTCTGAT |
| | | | | | | | GGTTAAAA |
| | | | | | | | (SEQ ID NO: 5832) |
| | | | | | | | AGATTGTCAAGCATTCC |
| | | | | | | | GTATTAAC |
| | | | | | | | (SEQ ID NO: 5833) |
| | | | | | | | ATTGATTCCCATCTGGC |
| | | | | | | | ATATTCTA |
| | | | | | | | (SEQ ID NO: 5834) |
| 208884_s_at | LOC | LOC730429 | ubiquitin | chr8q22 | Gain_{—} | 51366 | GGTAGTTGCAGAACAGC |
| | 730429 | | protein | | up | | CCTTACAT |
| | | | ligase E3 | | | | (SEQ ID NO: 5835) |
| | | | component | | | | AGGTCTACTAGATGTGC |
| | | | n-recognin 5 | | | | TTCCAAAA |
| | | | | | | | (SEQ ID NO: 5836) |
| | | | | | | | AAATGCTGATCAGTTTT |
| | | | | | | | ACCTCTTT |
| | | | | | | | (SEQ ID NO: 5837) |
| | | | | | | | GCAGTTCAAGCGTTGGT |
| | | | | | | | TCTGGTCA |
| | | | | | | | (SEQ ID NO: 5838) |
| | | | | | | | TTTTGGACATCAAGCCC |
| | | | | | | | ATCACTGC |
| | | | | | | | (SEQ ID NO: 5839) |
| | | | | | | | GAAGAAGGATTCCAGCC |
| | | | | | | | TATGCCCT |
| | | | | | | | (SEQ ID NO: 5840) |
| | | | | | | | GCCTATGCCCTCAATCA |
| | | | | | | | CAATAAGA |
| | | | | | | | (SEQ ID NO: 5841) |
| | | | | | | | CCAACATCTTCCTACTG |
| | | | | | | | CAAATACT |
| | | | | | | | (SEQ ID NO: 5842) |
| | | | | | | | ATACTTGCATTTCTCGA |
| | | | | | | | CTTTACGT |
| | | | | | | | (SEQ ID NO: 5843) |
| | | | | | | | TCCCACTCTATTCCTCT |
| | | | | | | | AAACAGAT |
| | | | | | | | (SEQ ID NO: 5844) |
| | | | | | | | AATTGTTACTCGCCATT |
| | | | | | | | AAGACCAA |
| | | | | | | | (SEQ ID NO: 5845) |
| 203596_s_at | IFIT5 | RI58; | interferon- | chr10q23.31 | Loss_{—} | 24138 | GTACATAACTTCTATCA |
| | | FLJ53857; | induced | | down | | CTTGCCAC |
| | | FLJ92678 | protein with | | | | (SEQ ID NO: 5846) |
| | | | tetratricopep- | | | | AAATCAGGGCCTGTGTT |
| | | | tide repeats 5 | | | | CATACACA |
| | | | | | | | (SEQ ID NO: 5847) |
| | | | | | | | GGCCTGAGATTTCTGCA |
| | | | | | | | CTTTAAAC |
| | | | | | | | (SEQ ID NO: 5848) |
| | | | | | | | GTAAGGTCTACAGCATT |
| | | | | | | | GTTCCTCA |
| | | | | | | | (SEQ ID NO: 5849) |
| | | | | | | | ATTGTTCCTCAAACTTG |
| | | | | | | | GCTACGTA |
| | | | | | | | (SEQ ID NO: 5850) |
| | | | | | | | TTGGCTACGTATTGGAA |
| | | | | | | | TCACCTAA |
| | | | | | | | (SEQ ID NO: 5851) |
| | | | | | | | CAAAACATGGATGTCTG |
| | | | | | | | GGTCCCGC |
| | | | | | | | (SEQ ID NO: 5852) |
| | | | | | | | GTCCCGCCCCATAGAGA |
| | | | | | | | ATGACTTA |
| | | | | | | | (SEQ ID NO: 5853) |
| | | | | | | | AATTGGCATGGGGTGCA |
| | | | | | | | GTCCAGGC |
| | | | | | | | (SEQ ID NO: 5854) |
| | | | | | | | GTTTGCATTTGGGACTC |
| | | | | | | | CTCATCAT |
| | | | | | | | (SEQ ID NO: 5855) |
| | | | | | | | GGACTCCTCATCATATA |
| | | | | | | | CTTGGTAT |
| | | | | | | | (SEQ ID NO: 5856) |
| 212592_at | IGJ | IGCJ, JCH | immunoglobulin J | chr4q21 | Loss_{—} | 3512 | GTATCAAAATCTTCCAA |
| | | | polypeptide, | | down | | TTATCATG |
| | | | linker protein | | | | (SEQ ID NO: 5857) |
| | | | for immuno- | | | | ATCTTCCAATTATCAT |
| | | | globulin | | | | GCTCACCTG |
| | | | alpha and mu | | | | (SEQ ID NO: 5858) |
| | | | polypeptides | | | | TCCAATTATCATGCTCA |
| | | | | | | | CCTGAAAG |
| | | | | | | | (SEQ ID NO: 5859) |
| | | | | | | | GCTCACCTGAAAGAGGT |
| | | | | | | | ATGCTCTC |
| | | | | | | | (SEQ ID NO: 5860) |
| | | | | | | | GAGGTATGCTCTCTTAG |
| | | | | | | | GAATACAG |
| | | | | | | | (SEQ ID NO: 5861) |
| | | | | | | | TAGGAATACAGTTTCTA |
| | | | | | | | GCATTAAA |
| | | | | | | | (SEQ ID NO: 5862) |
| | | | | | | | TAATAAAATGTTCCTCG |
| | | | | | | | CATTCCCC |
| | | | | | | | (SEQ ID NO: 5863) |
| | | | | | | | AGTTTCACTGTGTAGAG |
| | | | | | | | AACATATA |
| | | | | | | | (SEQ ID NO: 5864) |
| | | | | | | | ATAGGTCAATTATATGT |
| | | | | | | | CTCCATTA |
| | | | | | | | (SEQ ID NO: 5865) |
| | | | | | | | AAACATGTTCTAGAACT |
| | | | | | | | AGTTACAA |
| | | | | | | | (SEQ ID NO: 5866) |
| | | | | | | | AAATATATTTGGACATA |
| | | | | | | | ACAGACTT |
| | | | | | | | (SEQ ID NO: 5867) |
| 212692_s_at | LRBA | BGL, | LPS-responsive | chr4q31.3 | Loss_{—} | 987 | GTCTGTCTATCAATATT |
| | | CDC4L, | vesicle | | down | | GTTCTTCA |
| | | DKFZp686A | trafficking, | | | | (SEQ ID NO: 5868) |
| | | 09128, | beach and | | | | TTTCCTGATCTGTCATC |
| | | DKFZp686K | anchor | | | | TTCATAGC |
| | | 03100, | containing | | | | (SEQ ID NO: 5869) |
| | | DKFZp686P | | | | | AATGCTCTTGAGCTCA |
| | | 2258, | | | | | CAACATTTG |
| | | FLJ16600, | | | | | (SEQ ID NO: 5870) |
| | | FLJ25686, | | | | | ACCAAAGCTCACTACTG |
| | | LAB300, | | | | | CGGTTTGC |
| | | LBA, | | | | | (SEQ ID NO: 5871) |
| | | MGC72098 | | | | | GTTTGCCTGTGCCTGGA |
| | | | | | | | CAATGAGG |
| | | | | | | | (SEQ ID NO: 5872) |
| | | | | | | | GGACAATGAGGCGGAGC |
| | | | | | | | CACTGTTG |
| | | | | | | | (SEQ ID NO: 5873) |
| | | | | | | | TCCCCGGGTTTGCAAAT |
| | | | | | | | AGAGGCTA |
| | | | | | | | (SEQ ID NO: 5874) |
| | | | | | | | TAGAGGCTACCGGGTGC |
| | | | | | | | TGTATTCA |
| | | | | | | | (SEQ ID NO: 5875) |
| | | | | | | | GTTATTAAACTATCATC |
| | | | | | | | TCCACCTT |
| | | | | | | | (SEQ ID NO: 5876) |
| | | | | | | | CTCCACCTTCCTTTTGA |
| | | | | | | | TTAGCAAT |
| | | | | | | | (SEQ ID NO: 5877) |
| | | | | | | | GGTGGTGTATAATTCTA |
| | | | | | | | CTTTTCTA |
| | | | | | | | (SEQ ID NO: 5878) |
| 202548_s_at | ARHGEF | RP11- | Rho guanine | chr13q34 | Gain_{—} | 8874 | GTTACGGCATTGCCTTT |
| | 7 | 494P5.1, | nucleotide | | up | | TCTTTCTG |
| | | BETA-PIX, | exchange | | | | (SEQ ID NO: 5879) |
| | | COOL1, | factor | | | | TTCTGTGGATCCAGTAT |
| | | DKFZp686C | (GEF) 7 | | | | CTTCCTCG |
| | | 12170, | | | | | (SEQ ID NO: 5880) |
| | | DKFZp761K | | | | | ATCTTCCTCGGCTTTTT |
| | | 1021, | | | | | AGGGAGCA |
| | | KIAA0142, | | | | | (SEQ ID NO: 5881) |
| | | KIAA0412, | | | | | AAACCTGCCCTGTTG |
| | | Nbla10314, | | | | | TATATAACTG |
| | | P50, | | | | | (SEQ ID NO: 5882) |
| | | P50BP, | | | | | AACTGTGTCTGTTTCA |
| | | P85, | | | | | CCGTGTGAC |
| | | P85COOL1, | | | | | (SEQ ID NO: 5883) |
| | | P85SPR, | | | | | GCCACGATTTGCCCGAG |
| | | PAK3, PIXB | | | | | GGTTACTC |
| | | | | | | | (SEQ ID NO: 5884) |
| | | | | | | | CCTTTGCTCTCACCTT |
| | | | | | | | GTATGGATG |
| | | | | | | | (SEQ ID NO: 5885) |
| | | | | | | | GATGAAGCCATTTCTTA |
| | | | | | | | TCCTGTAG |
| | | | | | | | (SEQ ID NO: 5886) |
| | | | | | | | GTAGCATCAGAAGCTC |
| | | | | | | | GTTCCTTCA |
| | | | | | | | (SEQ ID NO: 5887) |
| | | | | | | | CACACTCAGTGGCGTCT |
| | | | | | | | GTGCTTGT |
| | | | | | | | (SEQ ID NO: 5888) |
| | | | | | | | CACCCAGGGCGCCTGTT |
| | | | | | | | GACAAGTG |
| | | | | | | | (SEQ ID NO: 5889) |
| 209627_s_at | OSBPL3 | DKFZp667P | oxysterol | chr7p15 | Gain_{—} | 26031 | GTTATGCCTTCTGGCTA |
| | | 1518, | binding | | up | | CTACAGAA |
| | | KIAA0704, | protein-like 3 | | | | (SEQ ID NO: 5890) |
| | | MGC21526, | | | | | ACAGAATCTCCGCAGAC |
| | | ORP-3, | | | | | CTTTTAGT |
| | | ORP3, | | | | | (SEQ ID NO: 5891) |
| | | OSBP3 | | | | | GAAGGTGTCCTTATGGT |
| | | | | | | | CTTAGGAA |
| | | | | | | | (SEQ ID NO: 5892) |
| | | | | | | | ATAGCTATTTTCATTT |
| | | | | | | | GCTCTATTT |
| | | | | | | | (SEQ ID NO: 5893) |
| | | | | | | | TGCTCTATTTTCCTCTG |
| | | | | | | | CATTGTAC |
| | | | | | | | (SEQ ID NO: 5894) |
| | | | | | | | GCATTGTACTAATCTGT |
| | | | | | | | TACTCAGT |
| | | | | | | | (SEQ ID NO: 5895) |
| | | | | | | | GTTACTCAGTGTTAGTC |
| | | | | | | | TTCATTTT |
| | | | | | | | (SEQ ID NO: 5896) |
| | | | | | | | GTGTTGGAAACCTGCGT |
| | | | | | | | CATGTAAA |
| | | | | | | | (SEQ ID NO: 5897) |
| | | | | | | | AATCTTCCACTTAACCA |
| | | | | | | | CTGAAAAT |
| | | | | | | | (SEQ ID NO: 5898) |
| | | | | | | | AGCTCCTATTAATTTGC |
| | | | | | | | TTATCCCC |
| | | | | | | | (SEQ ID NO: 5899) |
| | | | | | | | TATCCCCCTCATGTAGC |
| | | | | | | | TAGTTGAA |
| | | | | | | | (SEQ ID NO: 5900) |
| 212448_at | NEDD4L | FLJ33870, | neural precursor | chr18q21 | Loss_{—} | 23327 | GTTGTGCCTCTTGTGTG |
| | | KIAA0439, | cell expressed, | | down | | CTAGATTA |
| | | NEDD4-2, | developmentally | | | | (SEQ ID NO: 5901) |
| | | RSP5, | down-regulated | | | | ACTTGACTTGATCCTCT |
| | | hNedd4-2 | 4-like | | | | GAGCTCAA |
| | | | | | | | (SEQ ID NO: 5902) |
| | | | | | | | GGCAGAGGACTGAGGGT |
| | | | | | | | ACCTGCAC |
| | | | | | | | (SEQ ID NO: 5903) |
| | | | | | | | TGCACAGTTTGATTCTT |
| | | | | | | | TTCCACGT |
| | | | | | | | (SEQ ID NO: 5904) |
| | | | | | | | TTTTCCACGTGTAAGTC |
| | | | | | | | TCCATTGC |
| | | | | | | | (SEQ ID NO: 5905) |
| | | | | | | | GTCTCCATTGCAGAATT |
| | | | | | | | GTCGTGCT |
| | | | | | | | (SEQ ID NO: 5906) |
| | | | | | | | GTGTGGGAGTTGAACGA |
| | | | | | | | CCCTGCTG |
| | | | | | | | (SEQ ID NO: 5907) |
| | | | | | | | GACCCTGTCGGGGCAGT |
| | | | | | | | CAGGGGAC |
| | | | | | | | (SEQ ID NO: 5908) |
| | | | | | | | GAGATTTGATCTCATGC |
| | | | | | | | GAGTCATC |
| | | | | | | | (SEQ ID NO: 5909) |
| | | | | | | | CCTGCCCTGGCTGGCAT |
| | | | | | | | GTGAGAAG |
| | | | | | | | (SEQ ID NO: 5910) |
| | | | | | | | GCTGAGTGTTGGTTCCT |
| | | | | | | | TTTTCTTA |
| | | | | | | | (SEQ ID NO: 5911) |
| 205770_at | GSR | MGC78522 | glutathione | chr8p21.1 | Loss_{—} | 2936 | TACCAACGTCAAAGGCA |
| | | | reductase | | down | | TCTATGCA |
| | | | | | | | (SEQ ID NO: 5912) |
| | | | | | | | GCAATAGCTGCTGGCCG |
| | | | | | | | AAAACTTG |
| | | | | | | | (SEQ ID NO: 5913) |
| | | | | | | | AACTTGCCCATCGACTT |
| | | | | | | | TTTGAATA |
| | | | | | | | (SEQ ID NO: 5914) |
| | | | | | | | CAACATCCCAACTGTGG |
| | | | | | | | TCTTCAGC |
| | | | | | | | (SEQ ID NO: 5915) |
| | | | | | | | TATTCAACGAGCTTTAC |
| | | | | | | | CCCGATGT |
| | | | | | | | (SEQ ID NO: 5916) |
| | | | | | | | TTACCCCGATGTATCAC |
| | | | | | | | GCAGTTAC |
| | | | | | | | (SEQ ID NO: 5917) |
| | | | | | | | AAATGCTGCAGGGTTTT |
| | | | | | | | GCTGTTGC |
| | | | | | | | (SEQ ID NO: 5918) |
| | | | | | | | TTTGACAACACAGTCGC |
| | | | | | | | CATTCACC |
| | | | | | | | (SEQ ID NO: 5919) |
| | | | | | | | TTCACCCTACCTCTTCA |
| | | | | | | | GAAGAGCT |
| | | | | | | | (SEQ ID NO: 5920) |
| | | | | | | | AAGAGCTGGTCACACTT |
| | | | | | | | CGTTGAGA |
| | | | | | | | (SEQ ID NO: 5921) |
| | | | | | | | GAACCAGGAGACACGTG |
| | | | | | | | TGGCGGGC |
| | | | | | | | (SEQ ID NO: 5922) |
| 209234_at | KIF1 B | CMT2, | kinesin family | chr1p36.2 | Loss_{—} | 23095 | TAGCCAAACGGCTGTGC |
| | | CMT2A, | member 1B | | down | | TCAGATGG |
| | | CMT2A1, | | | | | (SEQ ID NO: 5923) |
| | | FLJ23699, | | | | | TGAGCTGAGGTTGGTCT |
| | | HMSNII, | | | | | CTTGCCAA |
| | | KIAA0591, | | | | | (SEQ ID NO: 5924) |
| | | KIAA1448, | | | | | GTTGTTCTTCATGTCTT |
| | | KLP, | | | | | CGAGTTCA |
| | | MGC134844 | | | | | (SEQ ID NO: 5925) |
| | | | | | | | TTTTTTTCATTCTGCCT |
| | | | | | | | ATTCTGGC |
| | | | | | | | (SEQ ID NO: 5926) |
| | | | | | | | ATCAGCTCACTTGAGG |
| | | | | | | | AGTCCCTCA |
| | | | | | | | (SEQ ID NO: 5927) |
| | | | | | | | GGCATCGTCTTAGACTT |
| | | | | | | | TGTGGCTC |
| | | | | | | | (SEQ ID NO: 5928) |
| | | | | | | | TGTGGCTCTAAAGTAC |
| | | | | | | | CTGTCTGTT |
| | | | | | | | (SEQ ID NO: 5929) |
| | | | | | | | ATTTCAAGTCTCTTGTC |
| | | | | | | | ACCATCCT |
| | | | | | | | (SEQ ID NO: 5930) |
| | | | | | | | AAGACTTTGCAAACTGA |
| | | | | | | | TCTCTCCC |
| | | | | | | | (SEQ ID NO: 5931) |
| | | | | | | | GATCTCTCCCCCGTGAA |
| | | | | | | | GGAGTTGA |
| | | | | | | | (SEQ ID NO: 5932) |
| | | | | | | | AACCTTGCGTCACGGAG |
| | | | | | | | CTGTTAGT |
| | | | | | | | (SEQ ID NO: 5933) |
| 202594_at | LEPROT | HSPC112, | leptin | chr8p21.2- | Loss_{—} | 23484 | TATTGCCTAACTTAAGC |
| | L1 | Vps55, | receptor | p21.1 | down | | CATGACTT |
| | | my047 | overlapping | | | | (SEQ ID NO: 5934) |
| | | | transcript- | | | | AATATCGGCGTGTGGCT |
| | | | like 1 | | | | GGAGCCTT |
| | | | | | | | (SEQ ID NO: 5935) |
| | | | | | | | AGTTGGGAACTCTTTGT |
| | | | | | | | GCTTGTGA |
| | | | | | | | (SEQ ID NO: 5936) |
| | | | | | | | GTGCTTGTGATCTACTG |
| | | | | | | | GACTTTTT |
| | | | | | | | (SEQ ID NO: 5937) |
| | | | | | | | CAGGAAGTGCATTCTCT |
| | | | | | | | GGTCCTTC |
| | | | | | | | (SEQ ID NO: 5938) |
| | | | | | | | TCCCTATTTTCTGTTCT |
| | | | | | | | GGATGTCA |
| | | | | | | | (SEQ ID NO: 5939) |
| | | | | | | | AGTGCACTGCTACTGTT |
| | | | | | | | TTATCCAC |
| | | | | | | | (SEQ ID NO: 5940) |
| | | | | | | | GTTTTATCCACTTGGCC |
| | | | | | | | ACAGACTT |
| | | | | | | | (SEQ ID NO: 5941) |
| | | | | | | | AGACTTTTTCTAACAGC |
| | | | | | | | TGCGTATT |
| | | | | | | | (SEQ ID NO: 5942) |
| | | | | | | | GCATTGGCAGCATTGTG |
| | | | | | | | TCTTTGAC |
| | | | | | | | (SEQ ID NO: 5943) |
| | | | | | | | GTGTCTTTGACCTTGTA |
| | | | | | | | TACTAGCT |
| | | | | | | | (SEQ ID NO: 5944) |
| 220183_s_at | NUDT6 | gfg; bFGF; | nudix | chr4q26 | Loss_{—} | 11162 | TATTGGAGACACAGCGG |
| | | FGF-2; gfg- | (nucleoside | | down | | TTCGAGAA |
| | | 1; ASFGF2; | diphosphate | | | | (SEQ ID NO: 5945) |
| | | FGF-AS; | linked moiety | | | | GAGACACAGCGGTTCGA |
| | | FGF2AS | X)-type | | | | GAAGTTTT |
| | | | motif 6 | | | | (SEQ ID NO: 5946) |
| | | | | | | | ACAGCGGTTCGAGAAGT |
| | | | | | | | TTTTGAAG |
| | | | | | | | (SEQ ID NO: 5947) |
| | | | | | | | ATCAGAATTCAGGTCCG |
| | | | | | | | TCCTGAGT |
| | | | | | | | (SEQ ID NO: 5948) |
| | | | | | | | AGGTCCGTCCTGAGTAT |
| | | | | | | | TCGGCAAC |
| | | | | | | | (SEQ ID NO: 5949) |
| | | | | | | | TCCGTCCTGAGTATTCG |
| | | | | | | | GCAACAGC |
| | | | | | | | (SEQ ID NO: 5950) |
| | | | | | | | GTCCTGAGTATTCGGCA |
| | | | | | | | ACAGCACA |
| | | | | | | | (SEQ ID NO: 5951) |
| | | | | | | | GTATTCGGCAACAGCAC |
| | | | | | | | ACAAATCC |
| | | | | | | | (SEQ ID NO: 5952) |
| | | | | | | | TCGGCAACAGCACACAA |
| | | | | | | | ATCCTIGGA |
| | | | | | | | (SEQ ID NO: 5953) |
| | | | | | | | ACAGCACACAAATCCTG |
| | | | | | | | GAGCTTTT |
| | | | | | | | (SEQ ID NO: 5954) |
| | | | | | | | ACACAAATCCTGGAGCT |
| | | | | | | | TTTGGGAA |
| | | | | | | | (SEQ ID NO: 5955) |
| 217022_s_at | IGH@ | IGH; | immunoglobulin | chr14q32.33 | Loss_{—} | 1001265 | TCAAGTGGGAAGAGCGC |
| | | IGH.1@; | heavy locus/// | | down | 83/// | TGTTCAAG |
| | | IGHDY1; | immunoglobulin | | | 28303/// | (SEQ ID NO: 5956) |
| | | MGC72071; | heavy constant | | | 3492/// | GTGGGAAGAGCGCTGT |
| | | MGC88774 | alpha 1/// | | | 3493/// | TCAAGGACC |
| | | | immunoglobulin | | | 3494 | (SEQ ID NO: 5957) |
| | | | heavy constant | | | | ATCCGGAAACACATTCC |
| | | | alpha 2 (A2m | | | | GGCCCGAG |
| | | | marker)/// | | | | (SEQ ID NO: 5958) |
| | | | immunoglobulin | | | | CCCTGAACGAGCTGGTG |
| | | | heavy variable | | | | ACGCTGAC |
| | | | 3/OR16-13/// | | | | (SEQ ID NO: 5959) |
| | | | hypothetical | | | | GAACGAGCTGGTGACGC |
| | | | LOC100126583 | | | | TGACGTGC |
| | | | | | | | (SEQ ID NO: 5960) |
| | | | | | | | CCCCGCGAGAAGTACCT |
| | | | | | | | GACTTGGG |
| | | | | | | | (SEQ ID NO: 5961) |
| | | | | | | | GAGAAGTACCTGACTTG |
| | | | | | | | GGCATCCC |
| | | | | | | | (SEQ ID NO: 5962) |
| | | | | | | | CACCTTCGCTGTGACC |
| | | | | | | | AGCATACTG |
| | | | | | | | (SEQ ID NO: 5963) |
| | | | | | | | TCGCTGTGACCAGCATA |
| | | | | | | | CTGCGCGT |
| | | | | | | | (SEQ ID NO: 5964) |
| | | | | | | | TGACCAGCATACTGCG |
| | | | | | | | CGTGGCAGC |
| | | | | | | | (SEQ ID NO: 5965) |
| | | | | | | | TCAATGTGTCTGTTGTC |
| | | | | | | | ATGGCGGA |
| | | | | | | | (SEQ ID NO: 5966) |
| 212112_s_at | STX12 | RP3- | syntaxin 12 | chr1p35- | Loss_{—} | 23673 | TCACTTGTGGTTCTACA |
| | | 426I6.4, | | p34.1 | down | | TTCCTGGT |
| | | MGC51957, | | | | | (SEQ ID NO: 5967) |
| | | STX13, | | | | | TGAATGTTGCTGTCAAA |
| | | STX14 | | | | | GGGCTGCC |
| | | | | | | | (SEQ ID NO: 5968) |
| | | | | | | | TGCCCCCTACCTTATAA |
| | | | | | | | GGGTTGCT |
| | | | | | | | (SEQ ID NO: 5969) |
| | | | | | | | ATATAAATGTTGTCCAC |
| | | | | | | | TTCCCTTT |
| | | | | | | | (SEQ ID NO: 5970) |
| | | | | | | | CCTTTTCCACAGGCCTA |
| | | | | | | | GAACAGTT |
| | | | | | | | (SEQ ID NO: 5971) |
| | | | | | | | CATAATTTGTTTAGGCT |
| | | | | | | | CCCACATA |
| | | | | | | | (SEQ ID NO: 5972) |
| | | | | | | | GGCCAACAACTTTGGTT |
| | | | | | | | CATCCTTT |
| | | | | | | | (SEQ ID NO: 5973) |
| | | | | | | | GAGGATTTGGCTACCCT |
| | | | | | | | GAGTATAT |
| | | | | | | | (SEQ ID NO: 5974) |
| | | | | | | | TTATATTCATTTCTTCT |
| | | | | | | | GTTCTCCT |
| | | | | | | | (SEQ ID NO: 5975) |
| | | | | | | | AGGGCCCAAATGCATAA |
| | | | | | | | GTTTCTTT |
| | | | | | | | (SEQ ID NO: 5976) |
| | | | | | | | AAGTTTCTTTGCACTGT |
| | | | | | | | TGCACTTA |
| | | | | | | | (SEQ ID NO: 5977) |
| 202033_s_at | RB1CC1 | CC1, | RB1-inducible | chr8q11 | Gain_{—} | 9821 | TGATTTGTCCTGCAGTG |
| | | DRAGOU14, | coiled-coil 1 | | up | | CTCATTCA |
| | | FIP200 | | | | | (SEQ ID NO: 5978) |
| | | | | | | | AACAGCAGGCCATCTTT |
| | | | | | | | TTATGCAA |
| | | | | | | | (SEQ ID NO: 5979) |
| | | | | | | | ACTTCACTGGTGTACAT |
| | | | | | | | CGTTTACT |
| | | | | | | | (SEQ ID NO: 5980) |
| | | | | | | | TCGTTTACTTTTTAACT |
| | | | | | | | GGCTTCAT |
| | | | | | | | (SEQ ID NO: 5981) |
| | | | | | | | AGAAATGCGGACCAAAC |
| | | | | | | | TACTTCAT |
| | | | | | | | (SEQ ID NO: 5982) |
| | | | | | | | ACTACTTCATTTTCTCA |
| | | | | | | | AAGGGCAT |
| | | | | | | | (SEQ ID NO: 5983) |
| | | | | | | | GCATACCTTGTGCATTG |
| | | | | | | | TGGCTTAT |
| | | | | | | | (SEQ ID NO: 5984) |
| | | | | | | | GATGAGCCATATTAATT |
| | | | | | | | GCCTGTTA |
| | | | | | | | (SEQ ID NO: 5985) |
| | | | | | | | GTTATTATTACCAGCATT |
| | | | | | | | TGTCCTT |
| | | | | | | | (SEQ ID NO: 5986) |
| | | | | | | | ATACTTGCACTCTTTAA |
| | | | | | | | CACATTCT |
| | | | | | | | (SEQ ID NO: 5987) |
| | | | | | | | AGAGGAGTGTTATTGCA |
| | | | | | | | TGCTGATA |
| | | | | | | | (SEQ ID NO: 5988) |
| 212096_s_at | MTUS1 | ATIP, | mitochondrial | chr8p22 | Loss_{—} | 57509 | TGGGTCATTTACATGTA |
| | | DKFZp586D | tumor | | down | | CACTACAT |
| | | 1519, | suppressor 1 | | | | (SEQ ID NO: 5989) |
| | | DKFZp686F | | | | | GATACTCATGTTGCATG |
| | | 20243, | | | | | TTCTTTTA |
| | | FLJ14295, | | | | | (SEQ ID NO: 5990) |
| | | KIAA1288, | | | | | TAGTGATTTTGTGTCTT |
| | | MP44, | | | | | AAGTCTTT |
| | | MTSG1 | | | | | (SEQ ID NO: 5991) |
| | | | | | | | TAAGTCTTTAACTTCCA |
| | | | | | | | ATACTTCA |
| | | | | | | | (SEQ ID NO: 5992) |
| | | | | | | | GTATGTAACCTTCCATG |
| | | | | | | | TTTGCTTC |
| | | | | | | | (SEQ ID NO: 5993) |
| | | | | | | | GGAAATGTAGGTTCACT |
| | | | | | | | GCCACTTC |
| | | | | | | | (SEQ ID NO: 5994) |
| | | | | | | | GGTTCACTGCCACTTCA |
| | | | | | | | TGAGATAT |
| | | | | | | | (SEQ ID NO: 5995) |
| | | | | | | | CATGAGATATCTCTGCT |
| | | | | | | | CACGCTTC |
| | | | | | | | (SEQ ID NO: 5996) |
| | | | | | | | CAAAGTTGGGTTTGCC |
| | | | | | | | ATTCATCCC |
| | | | | | | | (SEQ ID NO: 5997) |
| | | | | | | | ATGGTAAATCTTGTGTT |
| | | | | | | | GTTCCCTG |
| | | | | | | | (SEQ ID NO: 5998) |
| | | | | | | | TGTCCTCCGTATTACGT |
| | | | | | | | GACCGGCA |
| | | | | | | | (SEQ ID NO: 5999) |
| 212295_s_at | SLC7A1 | ERR; | solute carrier | chr13q12- | Gain_{—} | 6541 | TTCCTGCTTAAGTTGTG |
| | | ATRC1; | family 7 | q14 | up | | CCTTTCAG |
| | | CAT-1; | (cationic | | | | (SEQ ID NO: 6000) |
| | | HCAT1; | amino acid | | | | AAGTTGTGCCTTTCAGC |
| | | REC1L | transporter, | | | | TTCAATGA |
| | | | y+ system), | | | | (SEQ ID NO: 6001) |
| | | | member 1 | | | | GAATAGCTGTGGTTTCT |
| | | | | | | | CCAGTAAA |
| | | | | | | | (SEQ ID NO: 6002) |
| | | | | | | | TCTTCTACTGAACATGG |
| | | | | | | | AGCCATTA |
| | | | | | | | (SEQ ID NO: 6003) |
| | | | | | | | AAATCAGGTTGGTCTCT |
| | | | | | | | GCTGGGTC |
| | | | | | | | (SEQ ID NO: 6004) |
| | | | | | | | GACAAGTGTAGTTGTCG |
| | | | | | | | TCCACCAC |
| | | | | | | | (SEQ ID NO: 6005) |
| | | | | | | | TCGTCCACCACCTTTCA |
| | | | | | | | AAAAATGT |
| | | | | | | | (SEQ ID NO: 6006) |
| | | | | | | | CCTTTTTGCTGACAACA |
| | | | | | | | CTGTGTAC |
| | | | | | | | (SEQ ID NO: 6007) |
| | | | | | | | ACACTGTGTACATTGAC |
| | | | | | | | CACTTCCT |
| | | | | | | | (SEQ ID NO: 6008) |
| | | | | | | | ACCACTTCCTACCATAC |
| | | | | | | | TTTATGTT |
| | | | | | | | (SEQ ID NO: 6009) |
| | | | | | | | GGTACATTATCTCATGC |
| | | | | | | | TTCTGCAA |
| | | | | | | | (SEQ ID NO: 6010) |
| 219822_at | MTRF1 | RF1; MRF1; | mitochondrial | chr13q14.1- | Gain_{—} | 9617 | TTGGACCCCAAGGATTT |
| | | MTTRF1; | translational | q14.3 | up | | GCGAATAG |
| | | MGC47721 | release | | | | (SEQ ID NO: 6011) |
| | | | factor 1 | | | | GATACATTTCGAGCCAA |
| | | | | | | | AGGAGCAG |
| | | | | | | | (SEQ ID NO: 6012) |
| | | | | | | | TGATAGTGCCGTCAGAC |
| | | | | | | | TTGTCCAC |
| | | | | | | | (SEQ ID NO: 6013) |
| | | | | | | | CCACATCCCCACAGGGC |
| | | | | | | | TAGTAGTA |
| | | | | | | | (SEQ ID NO: 6014) |
| | | | | | | | GCCTTTCGTGTGTTGAG |
| | | | | | | | AGCTAGAC |
| | | | | | | | (SEQ ID NO: 6015) |
| | | | | | | | GAGCTAGACTCTACCAG |
| | | | | | | | CAGATTAT |
| | | | | | | | (SEQ ID NO: 6016) |
| | | | | | | | AGAGCCCAGTCAGAGCG |
| | | | | | | | AATTCGGA |
| | | | | | | | (SEQ ID NO: 6017) |
| | | | | | | | TCGGACATATAATTTCA |
| | | | | | | | CCCAGGAT |
| | | | | | | | (SEQ ID NO: 6018) |
| | | | | | | | GTCAGTGACCACAGGAT |
| | | | | | | | AGCATATG |
| | | | | | | | (SEQ ID NO: 6019) |
| | | | | | | | GGGAAGGGCCTGGATCA |
| | | | | | | | GCTAATTC |
| | | | | | | | (SEQ ID NO: 6020) |
| | | | | | | | GCTGAACTTTTGGATGA |
| | | | | | | | ACACCTTA |
| | | | | | | | (SEQ ID NO: 6021) |
| 209384_at | PROSC | FLJ11861 | proline | chr8p11.2 | Loss_{—} | 11212 | TTTTTCCTCTGGGACCT |
| | | | synthetase | | down | | ACAGTGAT |
| | | | cotranscribed | | | | (SEQ ID NO: 6022) |
| | | | homolog | | | | CTCCTCCACTATAATCC |
| | | | (bacterial) | | | | TCTTTAGG |
| | | | | | | | (SEQ ID NO: 6023) |
| | | | | | | | AACCCAGTGAATCTCAT |
| | | | | | | | TACTCCTA |
| | | | | | | | (SEQ ID NO: 6024) |
| | | | | | | | GCCTTTTCAGGCACATG |
| | | | | | | | GTTTCAAC |
| | | | | | | | (SEQ ID NO: 6025) |
| | | | | | | | GACATTCCTTGTCCTGA |
| | | | | | | | GGAGCACT |
| | | | | | | | (SEQ ID NO: 6026) |
| | | | | | | | TTCCAGGCATAGTTACA |
| | | | | | | | GCTTCCCC |
| | | | | | | | (SEQ ID NO: 6027) |
| | | | | | | | GCTTCCCCACTGTATTT |
| | | | | | | | ACAAGCCA |
| | | | | | | | (SEQ ID NO: 6028) |
| | | | | | | | TGTGCAACTCTTCTGGA |
| | | | | | | | TCATTAAT |
| | | | | | | | (SEQ ID NO: 6029) |
| | | | | | | | AAATGGCTTCAGTATGG |
| | | | | | | | CTTGTTTT |
| | | | | | | | (SEQ ID NO: 6030) |
| | | | | | | | TCCAGATGGCTTTTTCT |
| | | | | | | | CTTATTTT |
| | | | | | | | (SEQ ID NO: 6031) |
| | | | | | | | GAAGCCCCAGTCTTTGA |
| | | | | | | | TTTTACAG |
| | | | | | | | (SEQ ID NO: 6032) |

All gene probe set identification numbers and Entrez Gene identification numbers of Table 4 are hereby incorporated by reference in their entirety

[0123] The concordance between dysregulation and prognostic effect is highly evident in the 8p arm (FIG. 15). The KM plots for the 10 dysregulated genes in the 8p arm (Table 4) are illustrated in FIG. 16. Interestingly, the 20q arm, which is the most highly dysregulated chromosome arm (FIG. 13), has only one gene (TMEPAI) considered a good prognostic indicator. Among the 8p genes in the list is MTUS1, a putative tumor suppressor (Seibold et al., “Identification of a New Tumor Suppressor Gene Located at Chromosome 8p21.3-22” Faseb J 17:1180-1182 (2003), which is hereby incorporated by reference in its entirety) previously shown to be downregulated in colorectal cancer (Lee et al., “Differential Expression in Normal-Adenoma-Carcinoma Sequence Suggests Complex Molecular Carcinogenesis in Colon” Oncol Rep 16:747-754 (2006), which is hereby incorporated by reference in its entirety). The downregulation of PCM1 has been detected in both ovarian cancer (Pils et al., “Five Genes from Chromosomal Band 8p22 are Significantly Down-Regulated in Ovarian Carcinoma: N33 and EFA6R Have a Potential Impact on Overall Survival” Cancer 104:2417-2429 (2005), which is hereby incorporated by reference in its entirety) and breast cancer (Armes et al., “Candidate Tumor-Suppressor Genes on Chromosome Arm 8p in Early-Onset and High-Grade Breast Cancers” Oncogene 23:5697-5702 (2004), which is hereby incorporated by reference in its entirety). Recent studies suggest that the downregulation of ADAMDEC1 and EPHX2 may be directly associated with metastasis in colon cancer (Macartney-Coxson et al., “Metastatic Susceptibility Locus, an 8p Hot-Spot for Tumor Progression Disrupted in Colorectal Liver Metastases: 13 Candidate Genes Examined at the DNA, mRNA and Protein Level” BMC Cancer 8:18 (2008), which is hereby incorporated by reference in its entirety), and in breast cancer (Thomassen et al., “Gene Expression Meta-Analysis Identifies Chromosomal Regions and Candidate Genes Involved in Breast Cancer Metastasis” Breast Cancer Res Treat 113(2):239-49 (2008), which is hereby incorporated by reference in its entirety) respectively.

### Example 11

### Lecithin:Retinol Acyl Transferase Gene Promoter Methylation Analysis

[0124] Sodium bisulfite has been widely used to distinguish 5-methylcytosine from cytosine. Bisulfite converts cytosine into uracil via a deamination reaction while leaving 5-methylcytosine unchanged. Genomic DNAs extracted from colon tumor samples were used in this study. Typically, 1˜0.5 μg genomic DNA in a volume of 40 μl was incubated with 0.2N NaOH at 37° C. for 10 minutes. Next, 30 μl of 10 mM hydroquinone and 520 μl of 3M sodium bisulfite were added to the reaction. Sodium bisulfite (3M) was made with 1.88 g sodium bisulfite (Sigma Chemicals, ACS grade) dissolved in a final total of 5 ml deionized water at pH 5.0. The bisulfite/DNA mixture was incubated for 16 hours in a DNA thermal cycler (Perkin Elmer Cetus), cycling between 50° C. for 20 minutes and 85° C. for 15 seconds. The bisulfite treated DNA was desalted using MICROCON centrifugal filter devices (Millipore, Bedford, Mass.) or, alternatively, was cleaned with Wizard DNA clean-up kit (Promega, Madison, Wis.). The eluted DNA was incubated with one-tenth volume of 3N NaOH at room temperature for 5 minutes before ethanol precipitation. The DNA pellet was then resuspended in 20 μl deionized H₂O and stored at 4° C. until PCR amplification.

### Example 12

### Multiplex PCR Amplification

[0125] Two promoter regions of the LRAT gene were simultaneously amplified in a multiplex fashion. The multiplex PCR has two stages, namely a gene-specific amplification (stage one) and a universal amplification (stage two). The PCR primers are shown in Table 5.

TABLE 5
Primer Sequences for LRAT Analysis

| | | | CONC. |
|---|---|---|---|
| PRIMERS | | SEQUENCE (5′ to 3′) | in PCR |
| LRAT | SEQ ID | CGCTGCCAACTACCGCACATCTTAT | 1.25 pmol |
| RP1 | NO: 6033 | TTTTTATTGTGGTTTGGTTGAGTC | |
| LRAT | SEQ ID | CGCTGCCAACTACCGCACATCACCT | 1.25 pmol |
| FP1 | NO: 6034 | CCAACATAAAATTCTTCATCCTAC | |
| LRAT | SEQ ID | CGCTGCCAACTACCGCACATCATAAT | 2.5 pmol |
| RP3 | NO: 6035 | CGTGTTGTTTATATGATGTTCGATA | |
| LRAT | SEQ ID | CGCTGCCAACTACCGCACATCCACAA | 2.5 pmol |
| FP3 | NO: 6036 | CAAACTATAAAAAATAAAACCCAAC | |
| UniB2 | SEQ ID | CGCTGCCAACTACCGCACATC | 12.5 pmol |
| | NO: 6037 | | |

[0126] The gene-specific PCR primers were designed such that the 3′ sequence contains a gene-specific region and the 5′ region contains an universal sequence. The gene specific primers design allows hybridization to promoter regions containing as few CpG sites as possible. For primers that inevitably include one or more CpG dinucleotides, the nucleotide analogs, K and P, which can hybridize to either C or T nucleotides or G or A nucleotides, respectively, can be included in the primer design. To reduce the cost of primer synthesis, PCR primers were designed without nucleotide analogs and using nucleotides G to replace K (purine derivative) and T to replace P (pyrimidine derivative), respectively. This type of primer design favors pairing to DNA that was initially methylated, although it also allows the mismatch pairing of G/T when the original DNA was unmethylated at that site. The ethidium bromide staining intensity of PCR amplicons separated by the agarose gel electrophoresis, demonstrated that this primer design was as robust as using analogs-containing primers.

[0127] In the first stage, the multiplex PCR reaction mixture (12.40 consisted of 0.5 μl bisulfite modified DNA, 400 μM of each dNTP, 1× AmpliTaq Gold PCR buffer, 4 mM MgCl2, and 1.25 U AmpliTaq Gold polymerase. The gene-specific PCR primer concentrations are listed in the Table 5. Mineral oil was added to each reaction before thermal cycling. The PCR procedure included a pre-denaturation step at 95° C. for 10 minutes, 15 cycles of three-step amplification with each cycle consisting of denaturation at 94° C. for 30 second, annealing at 60° C. for 1 minute, and extension at 72° C. for 1 minute. A final extension step was at 72° C. for 5 minutes.

[0128] The second stage of multiplex PCR amplification was primed from the universal sequences (UniB) located at the extreme 5′ end of the gene-specific primers. The second stage PCR reaction mixture (12.50 consisted of 400 μM of each dNTP, 1× AmpliTaq Gold PCR buffer, 4 mM MgCl2, 12.5 μmol universal primer B (UniB) and 1.25 U AmpliTaq Gold polymerase. The UniB PCR primer sequence is listed in the Table 5. The 12.5 μl reaction mixtures were added through the mineral oil to the finished first stage PCR reactions. The PCR procedure included a pre-denaturation step at 95° C. for 10 minutes, 30 cycles of three-step amplification with each cycle consisting of denaturation at 94° C. for 30 second, annealing at 55° C. for 1 minute, and extension at 72° C. for 1 minute. A final extension step was at 72° C. for 5 minutes.

[0129] After the two-stage PCR reaction, 1.25 μl Qiagen Proteinase K (approximately 20 mg/ml) was added to the total 25 μl reaction. The Proteinase K digestion condition consisted of 70° C. for 10 minutes and 90° C. for 15 minutes.

### Example 13

### Ligase Detection Reaction and Hybridization to Universal Array

[0130] Ligation detection reactions were carried out in a 20 μl volume containing 20 mM Tris-HCl pH 7.6, 10 mM MgCl2, 100 mM KCl, 20 mM DTT, 1 mM NAD, 50 fmol wild-type Tth ligase, 500 fmol each of LDR probes, 5-10 ng each of the PCR amplicons. The Tth ligase can be diluted in a buffer containing 15 mM Tris-HCl pH 7.6, 7.5 mM MgCl2, 0.15 mg/ml BSA. To ensure the scoring accuracy of a LRAT promoter methylation status, 30 LDR probes were designed to interrogate the methylation levels of ten CpG dinucleotide sites within the PCR amplified regions. Two discriminating LDR probes and one common LDR probe were designed for each of the CpG sites. The LDR probe mix contains 60 discriminating probes (30 probes for each channel) and 10 common probes (Table 6). The reaction mixtures were pre-heated for 3 minutes at 95° C., and then cycled for 20 rounds of 95° C. for 30 seconds and 60° C. for four minutes.

[0131] The ligation detection reaction (20 μl) was diluted with equal volume of 2× hybridization buffer (8×SSC and 0.2% SDS), and denatured at 95° C. for 3 minutes then plunged on ice. The Universal Arrays (Amersham Biosciences, Piscataway, N.J.) were assembled with ProPlate slide modules (Grace Bio-Labs, Bend, Oreg.) and filled with the 40 μl denatured LDR mixes. The assembled arrays were incubated in a rotating hybridization oven for 60 minutes at 65° C. After hybridization, the arrays were rinsed briefly in 4×SSC and washed in 2×SSC, 0.1% SDS for 5-10 minutes at 63.5° C. The fluorescent signals were measured using a ProScanArray scanner (Perkin Elmer, Boston, Mass.).

TABLE 6
Probe Sequences for Ligase Detection Reaction

| PRIMERS | SEQUENCE (5′ to 3′) | |
|---|---|---|
| LRAT 53T | (Cy5) TGTTATTT TT TAT TGT GGT TTG GTT GAG TTG GTT | (SEQ ID NO: 6038) |
| LRAT 172Tb | (Cy5) TTGTTTTTTTTTTTT TTT AGT GGT TGT ATT TTG TGT T | (SEQ ID NO: 6039) |
| LRAT 218T | (Cy5) TTTTGTC GGA GTG GTA TTG GTA TTT TTT TAA GAT | (SEQ ID NO: 6040) |
| LRAT 222T | (Cy5) GGTTTGTAGG TGA GTA GTA GTG TAG TAT TTT TGT TTG GT | (SEQ ID NO: 6041) |
| LRAT 242Tb | (Cy5) GTGTAGTATTTTTGT TTG GTG AGT TTA ATT TGT TTA GTT T | (SEQ ID NO: 6042) |
| LRAT 263T | (Cy5) TTAATTTGTT TAG TTT GGT TTT TGT TGG AGT GGT ATT | (SEQ ID NO: 6043) |
| LRAT2nd 40T | (Cy5) TTTATATGA TGT TTG ATA TTT TGT TGG TTT TGA TAG AT | (SEQ ID NO: 6044) |
| LRAT2nd 91T | (Cy5) GTAGAAGGTGG TTT TTA ATA AGT GTT TTA TTT TGG GT | (SEQ ID NO: 6045) |
| LRAT2nd 145T | (Cy5) GTATTCGCG TGG ATA TAG TGG AGG ATT TTG TTT AT | (SEQ ID NO: 6046 |
| LRAT2nd 218T | (Cy5) TAGAAAAAGGTATTG TTT AAT GAG GAG GTG GTG T | (SEQ ID NO: 6047) |
| LRAT 53C | (Cy3) ATTTTTTATTGTGGTTTGGTTGAGTCGGTC | (SEQ ID NO: 6048) |
| LRAT 172C | (Cy3) TTTTTTTTTAGCGGTCGTATTTTGCGTC | (SEQ ID NO: 6049) |
| LRAT 218C | (Cy3) TGTCGGAGTGGTATCGGTATTTTTTTAAGAC | (SEQ ID NO: 6050) |
| LRAT 222C | (Cy3) GTAGGTGAGTAGTAGCGTAGTATTTTTGTTCGGC | (SEQ ID NO: 6051) |
| LRAT 242C | (Cy3) TTTTGTTCGGCGAGTTTAATTTGTTTAGTTC | (SEQ ID NO: 6052) |
| LRAT 263C | (Cy3) TGTTTAGTTCGGTTTTTGTCGGAGTGGTATC | (SEQ ID NO: 6053) |
| LRAT2nd 40C | (Cy3) ATATGATGTTCGATATTTTGTTGGTTTTGATAGAC | (SEQ ID NO: 6054) |
| LRAT2nd 91C | (Cy3) GGTGGTTTTTAATAAGCGTTTTATTTTGGGC | (SEQ ID NO: 6055) |
| LRAT2nd 145C | (Cy3) TCGCGTGGATATAGTGGAGGATTTCGTTTAC | (SEQ ID NO: 6056) |
| LRAT2nd 218C | (Cy3) GGTATTGTTTAACGAGGAGGTGGCGC | (SEQ ID NO: 6057) |
| LRAT 53C (Z18) | pGTTAGGTTTCGTTGTTTTTTTTTGTTTTTTTTTTTTTTTAGGGAGGCTGCTGTC | (SEQ ID NO: 6058) |

| | | |
|---|---|---|
| | CTTTCGATCA | |
| 2LRAT 172C | pGTATTTTATTTGGTTTGTAGGTGAGTAGTAGCGTAGTATTTTTG | (SEQ ID NO: 6059) |
| (Z19) | ACAGCGTGTTCGTTGCTTGCATCA | |
| 3LRAT 222Cc | pGAG TTT AAT TTG TTT AGT TCG GTT TTT GTT | (SEQ ID NO: 6060) |
| (Z31) | GGATTGCGGGAACTCACGAGGTCGTAT | |
| 4LRAT 242Cb | pGGTTTTTGTCGGAGTGGTATTGGTATTTTTTTAATGGCGATGGTCCACTCGCAA | (SEQ ID NO: 6061) |
| (Z20) | TCA | |
| 5LRAT 263Cb | pGGT ATT TTT TTA AGA CGT TTT TTT TTT TGT AGG | (SEQ ID NO: 6062) |
| (Z32) | ATGGCACGGCTCGATAGGTCAAGCTTT | |
| 6LRAT 218C | pGTTTTTTTTTTTGTAGGATGAAGAATTTTATGTTGGAGGCATCGCACTTCGCTT | (SEQ ID NO: 6063) |
| (Z30) | TGGCTGATT | |
| 7LRAT2nd 40C | pGAT ATG GGG TGT ACG TAG AAG GTG GTT | (SEQ ID NO: 6064) |
| (Z10) | TTTACAAGGCACGTCCCAGACGCATCAA | |
| 8LRAT2nd 91C | pGTT ATT GTT AAA GTG GTT AGT ATT TGC GTG GAT ATA | (SEQ ID NO: 6065) |
| (Z11) | GTGGCACGGGAGCTGACGACGTGTCAA | |
| 9LRAT2nd 145C | pGGAGTTAATATTTTGGTTAATTATTTGGACGAGTTTTTTTAGACGCACCGCAAC | (SEQ ID NO: 6066) |
| (Z12) | AGGCTGTCAA | |
| 10LRAT2nd 218C | pGGAGGGTTGAAAAGTTGTTGGGTTTTATTTTTCATCGCTGCAAGTACCGCACTC | (SEQ ID NO: 6067) |
| (Z13) | AA | |

### Example 14

### Determination of Cytosine Methylation Levels at CpG Dinucleotide Sites

[0132] LDR is a single tube multiplex reaction with three probes interrogating each of the selected CpG sites. LDR products are captured on a Universal microarray using the ProPlate system (Grace BioLabs) where 64 hybridizations (four slides with 16 sub-arrays each) are carried out simultaneously. Each slide is scanned using a Perkin Elmer ProScanArray (Perkin Elmer, Boston, Mass.) under the same laser power and PMT within the linear dynamic range. The Cy3 and Cy5 dye bias were determined by measuring the fluorescence intensity of an equal quantity of Cy3 and Cy5 labeled LDR probes manually deposited on a slide surface. The fluorescence intensity ratio (W=ICy3/ICy5) was used to normalize the label bias when calculating the methylation ratio Cy3/(Cy3+Cy5). The methylation standard curves for each interrogated CpG dinucleotide were established using various combinations of in vitro methylated and unmethylated normal human lymphocyte genomic DNAs. The methylation levels of six CpG dinucleotides in the 5′-UTR regions were averaged and used to determine the overall promoter methylation status of LRAT gene.

### Example 15

### Quantitative Aspect of Bisulfite/PCR-PCR/LDR/Universal Array

[0133] Because PCR primer and LDR probe design does not bias amplification or detection of methylation status, independent of methylation status of neighboring CpG dinucleotides (i.e. by using nucleotide analogues or degenerate bases within the primer designs), it is possible to quantify methylation status of given CpG sites in the genome.

[0134] To demonstrate that the assay is quantitative, genomic DNA in vitro methylated with SssI methylase was mixed with normal human lymphocytes DNA (carrying unmethylated alleles), such that the test samples contained 0%, 20%, 40%, 60%, 80%, and 100% of methylated alleles and these mixtures were subjected to Bisulfite-PCR/LDR/Universal Array analysis. The fluorescence intensity is presented by Cy3 (methylated alleles) or Cy5, (unmethylated alleles) on each double spotted zipcode addresses. The average fluorescence intensity of two duplicated spots was used to calculate the methylation ratio of each analyzed cytosine using the formula Cy3average/(Cy3 average+Cy5 average).

[0135] The measured methylation ratios of each interrogate cytosine was plotted against the methylation levels of mixed genomic DNAs. The R² values (correlation coefficient) of these experiments are between 0.97 and 0.89, which demonstrates the linearity of the described assay. Such standard curves can be used as reference points for further measurements done in clinical samples. Similar standard curves were also established for genes such as p16INK4a, p14ARF, TIMP3, APC, RASSF1, ECAD, MGMT, DAPK, GSTP1 and RARβ (Cheng et al., “Multiplexed Profiling of Candidate Genes for CpG Island Methylation Status Using a Flexible PCR/LDR/Universal Array Assay,” Genome Res. 16(2):282-289 (2006), which is hereby incorporated by reference in its entirety). In “100%” in vitro methylated DNA sample, the Cy3average/(Cy3 average+Cy5 average) ratios of the investigated CpG sites were between 0.6 and 0.9. This observation suggested that in vitro methylation is not fully efficient due to sequence context variation of each CpG site. This analysis also confirmed the different percentage of methylation at each CpG dinucleotide and suggested that methylation level is not 100% at each CpG site in cell line DNA (Cheng et al., “Multiplexed Profiling of Candidate Genes for CpG Island Methylation Status Using a Flexible PCR/LDR/Universal Array Assay,” Genome Res. 16(2):282-289 (2006), which is hereby incorporated by reference in its entirety). By comparing the ratio of (methylated):(methylated+unmethylated) DNA in different cell lines, one can extrapolate the CpG methylation level at a given position. Overall, the data demonstrate that the bisulfite-PCR/LDR/Universal Array approach is a quantitative method for the measurement of DNA methylation.

### Example 16

### Tumor Specific LRAT Promoter Hypermethylation

[0136] Since aberrant DNA methylation may also result from aging, it is necessary to identify a promoter region where its methylation is disease specific. To demonstrate LRAT promoter region methylation is tumor specific, CRC tumor samples (n=133) and the adjacent normal tissues (n=69) were analyzed using bisulfite/PCR-PCR/LDR/Universal Array approach. For each clinical sample, the methylation levels of ten CpG dinucleotide sites residing in the 5′-UTR (CpG sites 1-6) and exon-1 (CpG sites 7-10) regions of LRAT promoter were interrogated. Since the tumor (disease) specific aberrant methylation was identified in the 5′-UTR, the methylation levels of CpG sites 1-6 were averaged (the mean value) to determine the overall promoter methylation status. A promoter with a mean value of methylation signal intensity greater than 0.2 was scored as hypermethylated (methylation score 1), while a mean value equal to or less than 0.2 was scored as unmethylated (methylation score 0). This approach allowed a simple scoring system to use quantitative methylation data from multiple representative CpG sites across a larger DNA sequence region. Such quantitative reports give non-ambiguous and repeatable results of study DNA methylation.

[0137] A series of 133 CRC patient samples from Memorial-Sloan Kettering Cancer Center tumor bank were subject to bisulfite/PCR-PCR/LDR/Universal Array analysis. The methylation levels of ten CpG dinucleotide sites in the LRAT promoter region were determined for each CRC sample. The average methylation level of CpG sites 1-6 was used to score the overall LRAT promoter methylation status. A hypermethylated promoter was defined as having an average methylation level greater than 0.2.

[0138] LRAT promoter hypermethylation in CRCs was initially studied in microsatellite instability (MSI) tumors that often show multiple hypermethylated genes. LRAT hypermethylation was found in 36 of 40 MSI samples (90%) and was confirmed using methylation specific PCR (FIG. 22A). Since the MSI patients typically have a better clinical outcome and MSI accounts for only 10-15% of sporadic CRCs, the frequency of aberrant LRAT hypermethylation in the majority of CRC instances was examined in 81 microsatellite stable (non-MSI) colorectal samples (FIG. 22B).

[0139] LRAT promoter methylation is significantly associated with increased survival for all sporadic, non-MSI CRC patients. When all four CRC stages were considered, patients with LRAT promoter hypermethylation had a better disease-specific survival rate than patients with unmethylated promoter (FIG. 23). Only 12 of 39 (30.8%) individuals with LRAT promoter hypermethylation had died within the study period, whereas 23 of 42 (54.8%) individuals with unmethylated LRAT promoter had died. Log rank test was used to compare the two survival curves produced from methylated and unmethylated LRAT groups (p=0.0296).

[0140] In a validation study, Kaplan-Meier survival analysis was carried out on an additional 44 non-MSI colorectal samples (total n=125) (FIG. 24) and a similar survival curve (p=0.02) was observed. In a subset of 60 colorectal tumor samples, analysis of methylation status of LRAT and retinoic acid receptor β(RARβ) revealed that promoter hypermethylation at both genes correlates with better prognosis (p=0.007, FIG. 25). This observation suggests that the association between LRAT methylation silencing and better prognosis may represent a RARβ independent pathway to the inhibition of tumorigenesis

[0141] Since the MSI patients typically have a better survival and clinical outcome, Kaplan-Meier survival analysis was performed on patients with non-MSI genotype. Survival was measured from the date of resection of colorectal cancer to the date of death, the completion of 5 years of follow-up, or the last clinical review before April 2006. Only cancer-related deaths were analyzed as events. A p-value of less than 0.05 was considered as statistical significance.

[0142] Although preferred embodiments have been depicted and described in detail herein, it will be apparent to those skilled in the relevant art that various modifications, additions, substitutions, and the like can be made without departing from the spirit of the invention and these are therefore considered to be within the scope of the invention as defined in the claims which follow.

The application's sequence listing, which the Patent Office published only in electronic form, follows.

SEQUENCE LISTING (6077 sequences)

SEQ ID NO: 1 - DNA, 25 bp, Artificial
  primer
taacaaagaacgagcacttcctttc

SEQ ID NO: 2 - DNA, 25 bp, Artificial
  primer
gcacttcctttcagagtttctgaga

SEQ ID NO: 3 - DNA, 25 bp, Artificial
  primer
ggaacagtctgggtggaatggggct

SEQ ID NO: 4 - DNA, 25 bp, Artificial
  primer
ggggctgaaaccatgtgcaagtctg

SEQ ID NO: 5 - DNA, 25 bp, Artificial
  primer
gagatgttaattttagggacccgtg

SEQ ID NO: 6 - DNA, 25 bp, Artificial
  primer
tgtttcctagcccacaagaatgcaa

SEQ ID NO: 7 - DNA, 25 bp, Artificial
  primer
aacagatactcgctagcctcattta

SEQ ID NO: 8 - DNA, 25 bp, Artificial
  primer
aaaggaggagtgcatctttggccga

SEQ ID NO: 9 - DNA, 25 bp, Artificial
  primer
gcatctttggccgacagtggtgtaa

SEQ ID NO: 10 - DNA, 25 bp, Artificial
  primer
ggtttggtcctatatttctagtcat

SEQ ID NO: 11 - DNA, 25 bp, Artificial
  primer
gtattttgtataccatcttcatata

SEQ ID NO: 12 - DNA, 25 bp, Artificial
  primer
tgaagtgcaactgaaagctgctagt

SEQ ID NO: 13 - DNA, 25 bp, Artificial
  primer
actgaaagctgctagtgatgatctg

SEQ ID NO: 14 - DNA, 25 bp, Artificial
  primer
ctgaaagctgctagtgatgatctgg

SEQ ID NO: 15 - DNA, 25 bp, Artificial
  primer
gtaatatacaatttgtccagtagcc

SEQ ID NO: 16 - DNA, 25 bp, Artificial
  primer
aatatacaatttgtccagtagccag

SEQ ID NO: 17 - DNA, 25 bp, Artificial
  primer
aatttgtccagtagccagtttgttt

SEQ ID NO: 18 - DNA, 25 bp, Artificial
  primer
aatggtcaccgcaggccatactacc

SEQ ID NO: 19 - DNA, 25 bp, Artificial
  primer
tcaccgcaggccatactaccaatga

SEQ ID NO: 20 - DNA, 25 bp, Artificial
  primer
ccatactaccaatgaaatggtaggt

SEQ ID NO: 21 - DNA, 25 bp, Artificial
  primer
gaaatagcactctgcatgctttgct

SEQ ID NO: 22 - DNA, 25 bp, Artificial
  primer
agcactctgcatgctttgctctaca

SEQ ID NO: 23 - DNA, 25 bp, Artificial
  primer
gcactctgcatgctttgctctacaa

SEQ ID NO: 24 - DNA, 25 bp, Artificial
  primer
cactctgcatgctttgctctacaag

SEQ ID NO: 25 - DNA, 25 bp, Artificial
  primer
actctgcatgctttgctctacaaga

SEQ ID NO: 26 - DNA, 25 bp, Artificial
  primer
ctctgcatgctttgctctacaagat

SEQ ID NO: 27 - DNA, 25 bp, Artificial
  primer
tctgcatgctttgctctacaagatg

SEQ ID NO: 28 - DNA, 25 bp, Artificial
  primer
attttgatctcacatttttatacct

SEQ ID NO: 29 - DNA, 25 bp, Artificial
  primer
aaattgctcacagttattacataca

SEQ ID NO: 30 - DNA, 25 bp, Artificial
  primer
attacatacacatcagccatcaact

SEQ ID NO: 31 - DNA, 25 bp, Artificial
  primer
acacatcagccatcaactaaagttg

SEQ ID NO: 32 - DNA, 25 bp, Artificial
  primer
actacaatatgtacatttctaagtc

SEQ ID NO: 33 - DNA, 25 bp, Artificial
  primer
cttttgctttaattccatgaatgtt

SEQ ID NO: 34 - DNA, 25 bp, Artificial
  primer
atgtttctttgatcatgaataactg

SEQ ID NO: 35 - DNA, 25 bp, Artificial
  primer
gtaagtcttgcctatattttcctga

SEQ ID NO: 36 - DNA, 25 bp, Artificial
  primer
tattttcctgatagcatatgacaaa

SEQ ID NO: 37 - DNA, 25 bp, Artificial
  primer
tattcatatttgtactttctgttaa

SEQ ID NO: 38 - DNA, 25 bp, Artificial
  primer
gtttttaagtttgcactcaaatctt

SEQ ID NO: 39 - DNA, 25 bp, Artificial
  primer
gtgccacttatccaccaggagggca

SEQ ID NO: 40 - DNA, 25 bp, Artificial
  primer
aggaggctgctgccaagtactacga

SEQ ID NO: 41 - DNA, 25 bp, Artificial
  primer
caagtactacgatgccattgcctgc

SEQ ID NO: 42 - DNA, 25 bp, Artificial
  primer
cattgcctgcctcaagaacctgcag

SEQ ID NO: 43 - DNA, 25 bp, Artificial
  primer
cctgggtcccctgaatggatccagc

SEQ ID NO: 44 - DNA, 25 bp, Artificial
  primer
gaggagtactacgaggtgctggacc

SEQ ID NO: 45 - DNA, 25 bp, Artificial
  primer
gtcaaggcctacttcaagcggggca

SEQ ID NO: 46 - DNA, 25 bp, Artificial
  primer
cggccgtgtggaatgcccaggaggc

SEQ ID NO: 47 - DNA, 25 bp, Artificial
  primer
gcctgtggtgagccgagagctgcgg

SEQ ID NO: 48 - DNA, 25 bp, Artificial
  primer
cctggaggcacggatccggcagaag

SEQ ID NO: 49 - DNA, 25 bp, Artificial
  primer
gggatcttctcccattgacaggagc

SEQ ID NO: 50 - DNA, 25 bp, Artificial
  primer
taggaaatccagcaatcctggcccc

SEQ ID NO: 51 - DNA, 25 bp, Artificial
  primer
cagaagttccccctaagaaccactg

SEQ ID NO: 52 - DNA, 25 bp, Artificial
  primer
aaggggagcctcctatgagaattcc

SEQ ID NO: 53 - DNA, 25 bp, Artificial
  primer
atgagaattcccctagtgattccct

SEQ ID NO: 54 - DNA, 25 bp, Artificial
  primer
tgattccctgtggaggtggttccca

SEQ ID NO: 55 - DNA, 25 bp, Artificial
  primer
aggctcatctgcccgaggagagaag

SEQ ID NO: 56 - DNA, 25 bp, Artificial
  primer
gaggagattggcacagtggggtggc

SEQ ID NO: 57 - DNA, 25 bp, Artificial
  primer
atcagcatctagtcatggagctcca

SEQ ID NO: 58 - DNA, 25 bp, Artificial
  primer
ataaatcaatctgtctttctcactg

SEQ ID NO: 59 - DNA, 25 bp, Artificial
  primer
aagcaacatggcattcacgcagggc

SEQ ID NO: 60 - DNA, 25 bp, Artificial
  primer
ggcattcacgcagggcctggtaatg

SEQ ID NO: 61 - DNA, 25 bp, Artificial
  primer
gcctgtccaacttcaacagtcggca

SEQ ID NO: 62 - DNA, 25 bp, Artificial
  primer
tgatgacatactcagtgtggcctcc

SEQ ID NO: 63 - DNA, 25 bp, Artificial
  primer
gtaactgcttatagccctttgggct

SEQ ID NO: 64 - DNA, 25 bp, Artificial
  primer
cgtgcatggcgtgatcctgatgagc

SEQ ID NO: 65 - DNA, 25 bp, Artificial
  primer
gaaaagtatggccgatctccagctc

SEQ ID NO: 66 - DNA, 25 bp, Artificial
  primer
agcggaaagtgatctgcatccccaa

SEQ ID NO: 67 - DNA, 25 bp, Artificial
  primer
ctccttctcgaatccttcagaacat

SEQ ID NO: 68 - DNA, 25 bp, Artificial
  primer
ttgacttcacctttagcccagaaga

SEQ ID NO: 69 - DNA, 25 bp, Artificial
  primer
atattgtgcctatgcttacggtgga

SEQ ID NO: 70 - DNA, 25 bp, Artificial
  primer
tgtacccctttaatgacccgtactg

SEQ ID NO: 71 - DNA, 25 bp, Artificial
  primer
cagctctgcagctaatgaggtcctg

SEQ ID NO: 72 - DNA, 25 bp, Artificial
  primer
caattaaacttttctgcttgctctc

SEQ ID NO: 73 - DNA, 25 bp, Artificial
  primer
aatgatctggtctgctggaaggtgg

SEQ ID NO: 74 - DNA, 25 bp, Artificial
  primer
tgggcagtgggttgagcgtgcagcc

SEQ ID NO: 75 - DNA, 25 bp, Artificial
  primer
gacttgcaccttttcagcagttatc

SEQ ID NO: 76 - DNA, 25 bp, Artificial
  primer
cagcagttatctagacctggccgca

SEQ ID NO: 77 - DNA, 25 bp, Artificial
  primer
ccgcagtggcctgagttgcagtgat

SEQ ID NO: 78 - DNA, 25 bp, Artificial
  primer
gattcgtattcactcattctttgat

SEQ ID NO: 79 - DNA, 25 bp, Artificial
  primer
agggttttgtgcgtgttgtttcagc

SEQ ID NO: 80 - DNA, 25 bp, Artificial
  primer
tatgacacgtggcaccagctgtaca

SEQ ID NO: 81 - DNA, 25 bp, Artificial
  primer
tgcccttctggttagtgttgttctt

SEQ ID NO: 82 - DNA, 25 bp, Artificial
  primer
gaagcattgatactgtggccactca

SEQ ID NO: 83 - DNA, 25 bp, Artificial
  primer
tattcagccaaaattaccgttttag

SEQ ID NO: 84 - DNA, 25 bp, Artificial
  primer
aatgccacatcctatatggtgttat

SEQ ID NO: 85 - DNA, 25 bp, Artificial
  primer
gaaagtacatttgtttgcctgtctt

SEQ ID NO: 86 - DNA, 25 bp, Artificial
  primer
ttcattttgtacattcttcccattc

SEQ ID NO: 87 - DNA, 25 bp, Artificial
  primer
aagtcatcataatttgttgccataa

SEQ ID NO: 88 - DNA, 25 bp, Artificial
  primer
gagtaacttcttaaatccctgttct

SEQ ID NO: 89 - DNA, 25 bp, Artificial
  primer
aaatccctgttctagcaaactaata

SEQ ID NO: 90 - DNA, 25 bp, Artificial
  primer
atattggttcatgtgcttgtgtata

SEQ ID NO: 91 - DNA, 25 bp, Artificial
  primer
aatagaccctactgtactgtgcttt

SEQ ID NO: 92 - DNA, 25 bp, Artificial
  primer
actgtactgtgctttggacatttga

SEQ ID NO: 93 - DNA, 25 bp, Artificial
  primer
tcactggaccgacgttttaacaacg

SEQ ID NO: 94 - DNA, 25 bp, Artificial
  primer
gataccttgggttgaatacactttt

SEQ ID NO: 95 - DNA, 25 bp, Artificial
  primer
gaatacacttttaacagccctagat

SEQ ID NO: 96 - DNA, 25 bp, Artificial
  primer
taacagccctagatcgatagcccta

SEQ ID NO: 97 - DNA, 25 bp, Artificial
  primer
gccctagccctagatagatagccct

SEQ ID NO: 98 - DNA, 25 bp, Artificial
  primer
agatagccctagccctagatagata

SEQ ID NO: 99 - DNA, 25 bp, Artificial
  primer
gtttacataattttgggccccagat

SEQ ID NO: 100 - DNA, 25 bp, Artificial
  primer
ggccccagatggttaagtgctaaat

SEQ ID NO: 101 - DNA, 25 bp, Artificial
  primer
gggtaggctatcaggaagtgcaggc

SEQ ID NO: 102 - DNA, 25 bp, Artificial
  primer
ggctggaaacatgcaggagctgtcc

SEQ ID NO: 103 - DNA, 25 bp, Artificial
  primer
gtccacaagtggaatttcttcttca

SEQ ID NO: 104 - DNA, 25 bp, Artificial
  primer
gaaacctcagttttgttcatacacc

SEQ ID NO: 105 - DNA, 25 bp, Artificial
  primer
cgtggccatccgcgtgaaggccatc

SEQ ID NO: 106 - DNA, 25 bp, Artificial
  primer
tgtctgcgctgcttgacagtgcaca

SEQ ID NO: 107 - DNA, 25 bp, Artificial
  primer
gcagcacccagcggaacgggatctg

SEQ ID NO: 108 - DNA, 25 bp, Artificial
  primer
gcggaacgggatctgtgaggtgctg

SEQ ID NO: 109 - DNA, 25 bp, Artificial
  primer
ggatctgtgaggtgctgtacgctgc

SEQ ID NO: 110 - DNA, 25 bp, Artificial
  primer
ctgcggggagttctcagagcatctg

SEQ ID NO: 111 - DNA, 25 bp, Artificial
  primer
caggccgtgtatgtgcagaacgtgg

SEQ ID NO: 112 - DNA, 25 bp, Artificial
  primer
cagaacgtggtcaagctctacgcct

SEQ ID NO: 113 - DNA, 25 bp, Artificial
  primer
agtttgtgcagagcgcagacctgga

SEQ ID NO: 114 - DNA, 25 bp, Artificial
  primer
gaagcttcaggccaaggacgtgcct

SEQ ID NO: 115 - DNA, 25 bp, Artificial
  primer
ggccaaggacgtgcctgtggcagag

SEQ ID NO: 116 - DNA, 25 bp, Artificial
  primer
gcctgtgtcttcgggctgaatttga

SEQ ID NO: 117 - DNA, 25 bp, Artificial
  primer
gtgtcttcgggctgaatttgatctg

SEQ ID NO: 118 - DNA, 25 bp, Artificial
  primer
tgaatttgatctggccatcccaggg

SEQ ID NO: 119 - DNA, 25 bp, Artificial
  primer
agtcccctgatggcagccagaagac

SEQ ID NO: 120 - DNA, 25 bp, Artificial
  primer
tgatggcagccagaagacgtctcta

SEQ ID NO: 121 - DNA, 25 bp, Artificial
  primer
ggcagccagaagacgtctctagtgt

SEQ ID NO: 122 - DNA, 25 bp, Artificial
  primer
gccagaagacgtctctagtgttgcg

SEQ ID NO: 123 - DNA, 25 bp, Artificial
  primer
gaagacgtctctagtgttgcgaaca

SEQ ID NO: 124 - DNA, 25 bp, Artificial
  primer
gtctctagtgttgcgaacactctgt

SEQ ID NO: 125 - DNA, 25 bp, Artificial
  primer
tgtgcacttgtatgttttgtaaact

SEQ ID NO: 126 - DNA, 25 bp, Artificial
  primer
ttgtaaacttggcatctgtaaaaat

SEQ ID NO: 127 - DNA, 25 bp, Artificial
  primer
ttttctgctctgtagtccaaaaaca

SEQ ID NO: 128 - DNA, 25 bp, Artificial
  primer
gcatgtcgaatatgtcaccagccac

SEQ ID NO: 129 - DNA, 25 bp, Artificial
  primer
cagccacttcatccttatggtgctg

SEQ ID NO: 130 - DNA, 25 bp, Artificial
  primer
gaaggctgccatgttgaactcagga

SEQ ID NO: 131 - DNA, 25 bp, Artificial
  primer
tcaaactccaggtagtacttgtcca

SEQ ID NO: 132 - DNA, 25 bp, Artificial
  primer
agtacttgtccatgaaatttctctg

SEQ ID NO: 133 - DNA, 25 bp, Artificial
  primer
tcgtcatccatgataatgtcctcta

SEQ ID NO: 134 - DNA, 25 bp, Artificial
  primer
atatccaaccacagcatcaaattct

SEQ ID NO: 135 - DNA, 25 bp, Artificial
  primer
gaaagacagcgcaaagctctctcct

SEQ ID NO: 136 - DNA, 25 bp, Artificial
  primer
ttctaaggcgtccatcgcagtcgcc

SEQ ID NO: 137 - DNA, 25 bp, Artificial
  primer
ggttaaggcctctcagccaaggccg

SEQ ID NO: 138 - DNA, 25 bp, Artificial
  primer
gggagtccctgtacttatagttgct

SEQ ID NO: 139 - DNA, 25 bp, Artificial
  primer
gaggaactcattgtcactttcagaa

SEQ ID NO: 140 - DNA, 25 bp, Artificial
  primer
ggtgaactgagctcatcaactcctt

SEQ ID NO: 141 - DNA, 25 bp, Artificial
  primer
caactccttggcatttgcagcctac

SEQ ID NO: 142 - DNA, 25 bp, Artificial
  primer
tgcagcctacctgtgcaatcatagg

SEQ ID NO: 143 - DNA, 25 bp, Artificial
  primer
ggagtaggttttctctggtctgatt

SEQ ID NO: 144 - DNA, 25 bp, Artificial
  primer
tctgccctcctggatgctattaaag

SEQ ID NO: 145 - DNA, 25 bp, Artificial
  primer
gaacaatcagatgcccaactctgtt

SEQ ID NO: 146 - DNA, 25 bp, Artificial
  primer
ccaactctgttgccttgtggaagat

SEQ ID NO: 147 - DNA, 25 bp, Artificial
  primer
gtgcttcttaaagtggtctcttctc

SEQ ID NO: 148 - DNA, 25 bp, Artificial
  primer
ttggtactaccatttggggaagcca

SEQ ID NO: 149 - DNA, 25 bp, Artificial
  primer
cttcctccagtgatggccggaagaa

SEQ ID NO: 150 - DNA, 25 bp, Artificial
  primer
gtgatggccggaagaagcgggggaa

SEQ ID NO: 151 - DNA, 25 bp, Artificial
  primer
gaagcgggggaagtacaaggacaag

SEQ ID NO: 152 - DNA, 25 bp, Artificial
  primer
ggcaaggagaaggcggaagcacagc

SEQ ID NO: 153 - DNA, 25 bp, Artificial
  primer
gggcgcaccaggcttattaagggag

SEQ ID NO: 154 - DNA, 25 bp, Artificial
  primer
cgcaccaggcttattaagggagatg

SEQ ID NO: 155 - DNA, 25 bp, Artificial
  primer
gatggcgaggtcctagaggaaatcg

SEQ ID NO: 156 - DNA, 25 bp, Artificial
  primer
agggtgccagtgggaagcctgatgg

SEQ ID NO: 157 - DNA, 25 bp, Artificial
  primer
gccagtgggaagcctgatgggtgct

SEQ ID NO: 158 - DNA, 25 bp, Artificial
  primer
gtgggaagcctgatgggtgctggtg

SEQ ID NO: 159 - DNA, 25 bp, Artificial
  primer
ggaagcctgatgggtgctggtggcc

SEQ ID NO: 160 - DNA, 25 bp, Artificial
  primer
tgaagcatgttgcatactaccctgg

SEQ ID NO: 161 - DNA, 25 bp, Artificial
  primer
taaacttgctactgttgttcaacac

SEQ ID NO: 162 - DNA, 25 bp, Artificial
  primer
gaatgtggcaacttgcttgtgccta

SEQ ID NO: 163 - DNA, 25 bp, Artificial
  primer
gactctgtggggactgcataggttt

SEQ ID NO: 164 - DNA, 25 bp, Artificial
  primer
tgtgtctatacattgctttccgcat

SEQ ID NO: 165 - DNA, 25 bp, Artificial
  primer
tgctttccgcatttcaagacatcca

SEQ ID NO: 166 - DNA, 25 bp, Artificial
  primer
aagacatccagacgctattaccaac

SEQ ID NO: 167 - DNA, 25 bp, Artificial
  primer
gacgctattaccaacattttcctgt

SEQ ID NO: 168 - DNA, 25 bp, Artificial
  primer
acattttcctgtgcattaacctctg

SEQ ID NO: 169 - DNA, 25 bp, Artificial
  primer
aggtggatgcattttttgtctgttt

SEQ ID NO: 170 - DNA, 25 bp, Artificial
  primer
tgtcagaaatcagatcagccctcaa

SEQ ID NO: 171 - DNA, 25 bp, Artificial
  primer
cgtcatccgctcagtcagcgaacag

SEQ ID NO: 172 - DNA, 25 bp, Artificial
  primer
ggaccctgagcagacaactttcatc

SEQ ID NO: 173 - DNA, 25 bp, Artificial
  primer
gcgtatgcattgctgagttcctgtc

SEQ ID NO: 174 - DNA, 25 bp, Artificial
  primer
tataattgtcaaccagctcgtcttc

SEQ ID NO: 175 - DNA, 25 bp, Artificial
  primer
cccgagaagccctgcaagatgtgtg

SEQ ID NO: 176 - DNA, 25 bp, Artificial
  primer
tgaggcccgtcacaagatccaggcc

SEQ ID NO: 177 - DNA, 25 bp, Artificial
  primer
agacttccacatcgtgaagctgccg

SEQ ID NO: 178 - DNA, 25 bp, Artificial
  primer
ccgctgttaccccatgaggtgcggg

SEQ ID NO: 179 - DNA, 25 bp, Artificial
  primer
cagacaaggtcaacaccttctcggc

SEQ ID NO: 180 - DNA, 25 bp, Artificial
  primer
gggcagagtttgcacaaagtccccc

SEQ ID NO: 181 - DNA, 25 bp, Artificial
  primer
tggtggggagctgtagttgccccct

SEQ ID NO: 182 - DNA, 25 bp, Artificial
  primer
gactcaccctgttccacatagaaca

SEQ ID NO: 183 - DNA, 25 bp, Artificial
  primer
agaagaggctgcggacctatcgttg

SEQ ID NO: 184 - DNA, 25 bp, Artificial
  primer
gtggcctcatcgtggttagcaaaac

SEQ ID NO: 185 - DNA, 25 bp, Artificial
  primer
gggtggcaaagtggacctccacctc

SEQ ID NO: 186 - DNA, 25 bp, Artificial
  primer
ggcaagctgcacttcggaattgatc

SEQ ID NO: 187 - DNA, 25 bp, Artificial
  primer
tgacgatactactatcaccgacctt

SEQ ID NO: 188 - DNA, 25 bp, Artificial
  primer
gaccttccctaagccgctggaagat

SEQ ID NO: 189 - DNA, 25 bp, Artificial
  primer
gaggtcaagtacagtctcctcatga

SEQ ID NO: 190 - DNA, 25 bp, Artificial
  primer
ggaaaaattgtcccgtctgtcactt

SEQ ID NO: 191 - DNA, 25 bp, Artificial
  primer
tgtcacttgttttgttgccttaata

SEQ ID NO: 192 - DNA, 25 bp, Artificial
  primer
ggggcgggttctgaagcgatgagag

SEQ ID NO: 193 - DNA, 25 bp, Artificial
  primer
cacgacacccatgagccgaaaggat

SEQ ID NO: 194 - DNA, 25 bp, Artificial
  primer
taaggatggctgattccccaagggc

SEQ ID NO: 195 - DNA, 25 bp, Artificial
  primer
ctccctccctgctggaggaacacgt

SEQ ID NO: 196 - DNA, 25 bp, Artificial
  primer
tttctcttaactcagcttttgctac

SEQ ID NO: 197 - DNA, 25 bp, Artificial
  primer
gaaacctgcaccaaggattgtccct

SEQ ID NO: 198 - DNA, 25 bp, Artificial
  primer
ccctcctagagcgtgtgcagactga

SEQ ID NO: 199 - DNA, 25 bp, Artificial
  primer
taaatcaagactcacatccctttcc

SEQ ID NO: 200 - DNA, 25 bp, Artificial
  primer
cagcctgccttgcagaccaatgggc

SEQ ID NO: 201 - DNA, 25 bp, Artificial
  primer
aatgggctccatgttctgtagcccc

SEQ ID NO: 202 - DNA, 25 bp, Artificial
  primer
gtcttagcaggagcgggccctgtac

SEQ ID NO: 203 - DNA, 25 bp, Artificial
  primer
cctgctgacctgctgtttggtagag

SEQ ID NO: 204 - DNA, 25 bp, Artificial
  primer
ttggatgctaccactgtactgtcgc

SEQ ID NO: 205 - DNA, 25 bp, Artificial
  primer
tcgcgtgccattgctgagctgggca

SEQ ID NO: 206 - DNA, 25 bp, Artificial
  primer
agctgtggatcctctagactccacc

SEQ ID NO: 207 - DNA, 25 bp, Artificial
  primer
gtgagcattacgatgttgcccgtgg

SEQ ID NO: 208 - DNA, 25 bp, Artificial
  primer
tcctgcaggactacaaatccctcca

SEQ ID NO: 209 - DNA, 25 bp, Artificial
  primer
gaagacaagttgaccgtgtcccgtg

SEQ ID NO: 210 - DNA, 25 bp, Artificial
  primer
ttgtctcagccattccaggttgctg

SEQ ID NO: 211 - DNA, 25 bp, Artificial
  primer
gaggtcttcacaggtcatatgggga

SEQ ID NO: 212 - DNA, 25 bp, Artificial
  primer
gaagctggtacccctgaaggagacc

SEQ ID NO: 213 - DNA, 25 bp, Artificial
  primer
acaggccttctatatggtgggaccc

SEQ ID NO: 214 - DNA, 25 bp, Artificial
  primer
tcgtgaggggtctttgtcctctgta

SEQ ID NO: 215 - DNA, 25 bp, Artificial
  primer
cgcgcagtcccgaagagtgtaagat

SEQ ID NO: 216 - DNA, 25 bp, Artificial
  primer
cctctctgatccgagctggatccag

SEQ ID NO: 217 - DNA, 25 bp, Artificial
  primer
gcatacagaccaatttctgcatcag

SEQ ID NO: 218 - DNA, 25 bp, Artificial
  primer
tgcatcagtgttatctcgaccagag

SEQ ID NO: 219 - DNA, 25 bp, Artificial
  primer
atctcgaccagaggctagtaggact

SEQ ID NO: 220 - DNA, 25 bp, Artificial
  primer
tggggcccagaatggtgtgtctcag

SEQ ID NO: 221 - DNA, 25 bp, Artificial
  primer
gtgtctcagctaatccaaagggagt

SEQ ID NO: 222 - DNA, 25 bp, Artificial
  primer
ttgtttgatggttgctttcttgatt

SEQ ID NO: 223 - DNA, 25 bp, Artificial
  primer
actgcttgacatgttggcattcata

SEQ ID NO: 224 - DNA, 25 bp, Artificial
  primer
tgtgtatcttactgtgactccgaaa

SEQ ID NO: 225 - DNA, 25 bp, Artificial
  primer
aaaactgtagtattggtgtcatggg

SEQ ID NO: 226 - DNA, 25 bp, Artificial
  primer
gaaggaacccaaagtggctgcttct

SEQ ID NO: 227 - DNA, 25 bp, Artificial
  primer
gaatccctatgtgaagcgttccatt

SEQ ID NO: 228 - DNA, 25 bp, Artificial
  primer
cctcactaccaacctgatcaatttg

SEQ ID NO: 229 - DNA, 25 bp, Artificial
  primer
caatacccaaggagtcgtttctgcc

SEQ ID NO: 230 - DNA, 25 bp, Artificial
  primer
ctaccatgatgagtgtccatcgcgg

SEQ ID NO: 231 - DNA, 25 bp, Artificial
  primer
gtgtccatcgcggagaggtaccttg

SEQ ID NO: 232 - DNA, 25 bp, Artificial
  primer
gaggtaccttgcacagtgacctctg

SEQ ID NO: 233 - DNA, 25 bp, Artificial
  primer
atctcctttagaagaagccacactc

SEQ ID NO: 234 - DNA, 25 bp, Artificial
  primer
agccacactctctgaattaaaaact

SEQ ID NO: 235 - DNA, 25 bp, Artificial
  primer
ggaggctaagactgatccgtcaatc

SEQ ID NO: 236 - DNA, 25 bp, Artificial
  primer
gactgatccgtcaatcttgggtgga

SEQ ID NO: 237 - DNA, 25 bp, Artificial
  primer
ctttcctgagtgtttgctttcggtt

SEQ ID NO: 238 - DNA, 25 bp, Artificial
  primer
gctttcggtttgttggtatgcctgt

SEQ ID NO: 239 - DNA, 25 bp, Artificial
  primer
tctttttgctctttcctatataatg

SEQ ID NO: 240 - DNA, 25 bp, Artificial
  primer
tgggattcctgtgtcttacagctct

SEQ ID NO: 241 - DNA, 25 bp, Artificial
  primer
gcaactttttgcacagctggtatct

SEQ ID NO: 242 - DNA, 25 bp, Artificial
  primer
tctggtagcagtgagaccccttgtc

SEQ ID NO: 243 - DNA, 25 bp, Artificial
  primer
ggtgatccttactgggtttccaagc

SEQ ID NO: 244 - DNA, 25 bp, Artificial
  primer
aaacctacagcctttctacattctg

SEQ ID NO: 245 - DNA, 25 bp, Artificial
  primer
agagagcagcctttgaaaatcccca

SEQ ID NO: 246 - DNA, 25 bp, Artificial
  primer
gaaaatccccaatttggttctgctt

SEQ ID NO: 247 - DNA, 25 bp, Artificial
  primer
cctctctctaccttttcagggtaat

SEQ ID NO: 248 - DNA, 25 bp, Artificial
  primer
aaagtgacttgcctggaatgataca

SEQ ID NO: 249 - DNA, 25 bp, Artificial
  primer
gcctggaatgatacagccaccgagc

SEQ ID NO: 250 - DNA, 25 bp, Artificial
  primer
ccaccgagcaggaggcaaggaaagc

SEQ ID NO: 251 - DNA, 25 bp, Artificial
  primer
gcaaggaaagccagctctgtctaac

SEQ ID NO: 252 - DNA, 25 bp, Artificial
  primer
aagccagctctgtctaactgctgct

SEQ ID NO: 253 - DNA, 25 bp, Artificial
  primer
agctctgtctaactgctgctgagta

SEQ ID NO: 254 - DNA, 25 bp, Artificial
  primer
gtctaactgctgctgagtactttgt

SEQ ID NO: 255 - DNA, 25 bp, Artificial
  primer
actgctgctgagtactttgtaaaag

SEQ ID NO: 256 - DNA, 25 bp, Artificial
  primer
acaaaaaatgtgatccagaactgtg

SEQ ID NO: 257 - DNA, 25 bp, Artificial
  primer
ttcgaacccagcctttacaatgtaa

SEQ ID NO: 258 - DNA, 25 bp, Artificial
  primer
ttacaatgtaatgaaaccctgcctc

SEQ ID NO: 259 - DNA, 25 bp, Artificial
  primer
ggagctggaggagatgctggtcccc

SEQ ID NO: 260 - DNA, 25 bp, Artificial
  primer
ctgcccagactggataccgggaccg

SEQ ID NO: 261 - DNA, 25 bp, Artificial
  primer
tgtccgcccagccagataggggaag

SEQ ID NO: 262 - DNA, 25 bp, Artificial
  primer
atgaaggcgtcgcggatgcgcctca

SEQ ID NO: 263 - DNA, 25 bp, Artificial
  primer
aaaaacgtgctgaagatccgccggc

SEQ ID NO: 264 - DNA, 25 bp, Artificial
  primer
tgaaccaccacaagtaccggaagct

SEQ ID NO: 265 - DNA, 25 bp, Artificial
  primer
gacgcggttcctgcggaggaaggtc

SEQ ID NO: 266 - DNA, 25 bp, Artificial
  primer
ggacgcctgagacgcaagcagatca

SEQ ID NO: 267 - DNA, 25 bp, Artificial
  primer
acctgaggcgcatctggctgaaggc

SEQ ID NO: 268 - DNA, 25 bp, Artificial
  primer
cccccaagatctacctgcggggcaa

SEQ ID NO: 269 - DNA, 25 bp, Artificial
  primer
cgttgctgctgtgatccgtagtaat

SEQ ID NO: 270 - DNA, 25 bp, Artificial
  primer
gacgtttatactggaatgtgccttc

SEQ ID NO: 271 - DNA, 25 bp, Artificial
  primer
aatgtgccttcagaaactcggcctc

SEQ ID NO: 272 - DNA, 25 bp, Artificial
  primer
ctcggcctcgttccagagaaacaca

SEQ ID NO: 273 - DNA, 25 bp, Artificial
  primer
aacatctgctcctatgtagatctga

SEQ ID NO: 274 - DNA, 25 bp, Artificial
  primer
tggtctcagttgcagagtgctcatt

SEQ ID NO: 275 - DNA, 25 bp, Artificial
  primer
gagtgatacccatttgagggcctct

SEQ ID NO: 276 - DNA, 25 bp, Artificial
  primer
ttgagggcctctaaacccttcaatt

SEQ ID NO: 277 - DNA, 25 bp, Artificial
  primer
gttctgatcttaccggctagtggtc

SEQ ID NO: 278 - DNA, 25 bp, Artificial
  primer
taaaaaacttgtaccctcttatctg

SEQ ID NO: 279 - DNA, 25 bp, Artificial
  primer
gtaccctcttatctgaaatcctgtt

SEQ ID NO: 280 - DNA, 25 bp, Artificial
  primer
cttctataatattcctacttcccat

SEQ ID NO: 281 - DNA, 25 bp, Artificial
  primer
agccagcagcccaggaggagtcact

SEQ ID NO: 282 - DNA, 25 bp, Artificial
  primer
agcccaggaggagtcactctcccag

SEQ ID NO: 283 - DNA, 25 bp, Artificial
  primer
cagcaagggcagtcctgcagcctgg

SEQ ID NO: 284 - DNA, 25 bp, Artificial
  primer
agtcctgcagcctggtgcatcacca

SEQ ID NO: 285 - DNA, 25 bp, Artificial
  primer
agcctggtgcatcaccacttcctga

SEQ ID NO: 286 - DNA, 25 bp, Artificial
  primer
ggtgcatcaccacttcctgatggag

SEQ ID NO: 287 - DNA, 25 bp, Artificial
  primer
ttcctgatggagagtcagaagcttc

SEQ ID NO: 288 - DNA, 25 bp, Artificial
  primer
gagagtcagaagcttccaggcctcc

SEQ ID NO: 289 - DNA, 25 bp, Artificial
  primer
cttccaggcctccaagggtccatgg

SEQ ID NO: 290 - DNA, 25 bp, Artificial
  primer
tccaagggtccatggaccacctact

SEQ ID NO: 291 - DNA, 25 bp, Artificial
  primer
gtccatggaccacctactgagactc

SEQ ID NO: 292 - DNA, 25 bp, Artificial
  primer
gagaggaacctagcatccccatcac

SEQ ID NO: 293 - DNA, 25 bp, Artificial
  primer
catcaccttccactctggttgaggc

SEQ ID NO: 294 - DNA, 25 bp, Artificial
  primer
ccactctggttgaggcaagagaggt

SEQ ID NO: 295 - DNA, 25 bp, Artificial
  primer
gaggcaactggtggtcctgagctat

SEQ ID NO: 296 - DNA, 25 bp, Artificial
  primer
agctatctggggtccctcgaggaga

SEQ ID NO: 297 - DNA, 25 bp, Artificial
  primer
acacacttcctatatgtatccacat

SEQ ID NO: 298 - DNA, 25 bp, Artificial
  primer
atcagatgctcattacaaatccaga

SEQ ID NO: 299 - DNA, 25 bp, Artificial
  primer
ttggactcttgcaacagatcacaaa

SEQ ID NO: 300 - DNA, 25 bp, Artificial
  primer
gactttggtcatttctgtatgttca

SEQ ID NO: 301 - DNA, 25 bp, Artificial
  primer
gggcgaaaccatcttgatccgatgc

SEQ ID NO: 302 - DNA, 25 bp, Artificial
  primer
gatccgatgcgaatgcagtaatgtt

SEQ ID NO: 303 - DNA, 25 bp, Artificial
  primer
gttctatataccatttcatcagtta

SEQ ID NO: 304 - DNA, 25 bp, Artificial
  primer
gttatttcttttagtcatgttgatt

SEQ ID NO: 305 - DNA, 25 bp, Artificial
  primer
actacagtgaaagcccttttcagtg

SEQ ID NO: 306 - DNA, 25 bp, Artificial
  primer
tggcctgactcagaactaccatgtg

SEQ ID NO: 307 - DNA, 25 bp, Artificial
  primer
gaaaatcagtactctcttaatgttt

SEQ ID NO: 308 - DNA, 25 bp, Artificial
  primer
tcccgcctcctaaaagaacaccagg

SEQ ID NO: 309 - DNA, 25 bp, Artificial
  primer
ggaggcgagaggctatcactgcagc

SEQ ID NO: 310 - DNA, 25 bp, Artificial
  primer
cgacctgcctgacagaagctttggt

SEQ ID NO: 311 - DNA, 25 bp, Artificial
  primer
ggtgtggcccaggcctacatgaacc

SEQ ID NO: 312 - DNA, 25 bp, Artificial
  primer
tgaagaccctacaggtccaggctgc

SEQ ID NO: 313 - DNA, 25 bp, Artificial
  primer
caggctgcccaatttgccaagcaga

SEQ ID NO: 314 - DNA, 25 bp, Artificial
  primer
gccaagcagacaggccagtggatcg

SEQ ID NO: 315 - DNA, 25 bp, Artificial
  primer
ggtggagaacttcaaccaggcactc

SEQ ID NO: 316 - DNA, 25 bp, Artificial
  primer
tgtggagaactgggctcggagcatc

SEQ ID NO: 317 - DNA, 25 bp, Artificial
  primer
caccattgccactgcactggaatat

SEQ ID NO: 318 - DNA, 25 bp, Artificial
  primer
ctacctcacccgcagggggaaggag

SEQ ID NO: 319 - DNA, 25 bp, Artificial
  primer
cacgagttgctcgacttaatcctac

SEQ ID NO: 320 - DNA, 25 bp, Artificial
  primer
tcaagcgtgcaatggatctggttca

SEQ ID NO: 321 - DNA, 25 bp, Artificial
  primer
gattagatttctaccaacacagctg

SEQ ID NO: 322 - DNA, 25 bp, Artificial
  primer
cagcgattccaggtggacccaagtg

SEQ ID NO: 323 - DNA, 25 bp, Artificial
  primer
actggcgaaaggtgcatgtccctgg

SEQ ID NO: 324 - DNA, 25 bp, Artificial
  primer
atgtccctggaaggagcatctctac

SEQ ID NO: 325 - DNA, 25 bp, Artificial
  primer
catctctaccacctggaatctgggc

SEQ ID NO: 326 - DNA, 25 bp, Artificial
  primer
ccatcttctttgttatctacactga

SEQ ID NO: 327 - DNA, 25 bp, Artificial
  primer
ggaccaggtcagtgggatccctggc

SEQ ID NO: 328 - DNA, 25 bp, Artificial
  primer
gtccatgcaagcggcttcattggcg

SEQ ID NO: 329 - DNA, 25 bp, Artificial
  primer
ccgacccgagagggtgccttgagca

SEQ ID NO: 330 - DNA, 25 bp, Artificial
  primer
gttagcatttcagtgccatctaccc

SEQ ID NO: 331 - DNA, 25 bp, Artificial
  primer
gccatctaccccacgacgaggtggg

SEQ ID NO: 332 - DNA, 25 bp, Artificial
  primer
agcccccttggaaatgatactcttt

SEQ ID NO: 333 - DNA, 25 bp, Artificial
  primer
gatactctttcatcagggttgccta

SEQ ID NO: 334 - DNA, 25 bp, Artificial
  primer
ctatggggccacggcgacaggtatg

SEQ ID NO: 335 - DNA, 25 bp, Artificial
  primer
atggccccttgccagggtaggagga

SEQ ID NO: 336 - DNA, 25 bp, Artificial
  primer
tccctttatcctgacaatctctagt

SEQ ID NO: 337 - DNA, 25 bp, Artificial
  primer
aatctctagtcgattcttgcctttt

SEQ ID NO: 338 - DNA, 25 bp, Artificial
  primer
cctttttctcccgattgcggatttg

SEQ ID NO: 339 - DNA, 25 bp, Artificial
  primer
atttgggggccacctctaagatgcc

SEQ ID NO: 340 - DNA, 25 bp, Artificial
  primer
aaattagtgccaacccaggggcctg

SEQ ID NO: 341 - DNA, 25 bp, Artificial
  primer
acgaggggtcgtggatgtggccaca

SEQ ID NO: 342 - DNA, 25 bp, Artificial
  primer
gtggccacacataggaccacacgtc

SEQ ID NO: 343 - DNA, 25 bp, Artificial
  primer
accacacgtcccagctgggaggaga

SEQ ID NO: 344 - DNA, 25 bp, Artificial
  primer
gtgggggacatggagagctgaggca

SEQ ID NO: 345 - DNA, 25 bp, Artificial
  primer
tcggcgcagtggaagtcagctgtcc

SEQ ID NO: 346 - DNA, 25 bp, Artificial
  primer
ctggtatcgccagccttaaggtgtc

SEQ ID NO: 347 - DNA, 25 bp, Artificial
  primer
acttggccaacctgaccttggaaga

SEQ ID NO: 348 - DNA, 25 bp, Artificial
  primer
ggaagatgctgctgagtgtctcaag

SEQ ID NO: 349 - DNA, 25 bp, Artificial
  primer
agcagcactgacagcagctgggcct

SEQ ID NO: 350 - DNA, 25 bp, Artificial
  primer
gggcggagactcagctggacagccc

SEQ ID NO: 351 - DNA, 25 bp, Artificial
  primer
gagggagggaatgggggtgggctgt

SEQ ID NO: 352 - DNA, 25 bp, Artificial
  primer
tctgacatagaacactggaatccca

SEQ ID NO: 353 - DNA, 25 bp, Artificial
  primer
ggaatcccagtgaggaattctaagt

SEQ ID NO: 354 - DNA, 25 bp, Artificial
  primer
gaacattccttatagaaacctttca

SEQ ID NO: 355 - DNA, 25 bp, Artificial
  primer
aatggtggccaggtagaggaactag

SEQ ID NO: 356 - DNA, 25 bp, Artificial
  primer
gaccatctgtgttattgtcactgag

SEQ ID NO: 357 - DNA, 25 bp, Artificial
  primer
atttactaaaactacactgcaccat

SEQ ID NO: 358 - DNA, 25 bp, Artificial
  primer
aactacactgcaccatgttagtaat

SEQ ID NO: 359 - DNA, 25 bp, Artificial
  primer
gaaatattgttgctcagtgttgtta

SEQ ID NO: 360 - DNA, 25 bp, Artificial
  primer
tatgctataaatgatacccccctac

SEQ ID NO: 361 - DNA, 25 bp, Artificial
  primer
taattggtagtatttcttccagaag

SEQ ID NO: 362 - DNA, 25 bp, Artificial
  primer
gactggcacttaccctgaagtgcat

SEQ ID NO: 363 - DNA, 25 bp, Artificial
  primer
ttcccatgagccactactctgatgt

SEQ ID NO: 364 - DNA, 25 bp, Artificial
  primer
tcccatgagccactactctgatgtc

SEQ ID NO: 365 - DNA, 25 bp, Artificial
  primer
ccatgagccactactctgatgtcag

SEQ ID NO: 366 - DNA, 25 bp, Artificial
  primer
gtcagcctataaccaaaggagctgg

SEQ ID NO: 367 - DNA, 25 bp, Artificial
  primer
gcctataaccaaaggagctgggggg

SEQ ID NO: 368 - DNA, 25 bp, Artificial
  primer
tttctcagcccactcaatcagggtg

SEQ ID NO: 369 - DNA, 25 bp, Artificial
  primer
ctcagcccactcaatcagggtgctc

SEQ ID NO: 370 - DNA, 25 bp, Artificial
  primer
agcctccctggtaagcagagactca

SEQ ID NO: 371 - DNA, 25 bp, Artificial
  primer
cctccctggtaagcagagactcaag

SEQ ID NO: 372 - DNA, 25 bp, Artificial
  primer
gagactcaagaaacctctggggtcc

SEQ ID NO: 373 - DNA, 25 bp, Artificial
  primer
gactcaagaaacctctggggtcctg

SEQ ID NO: 374 - DNA, 25 bp, Artificial
  primer
cacctgtaagtctttgtcttcacct

SEQ ID NO: 375 - DNA, 25 bp, Artificial
  primer
tgtcttcacctattatcatctggag

SEQ ID NO: 376 - DNA, 25 bp, Artificial
  primer
gcttgtgtgacggaaggtccttcag

SEQ ID NO: 377 - DNA, 25 bp, Artificial
  primer
gaggacctgaggaatgcctgggaga

SEQ ID NO: 378 - DNA, 25 bp, Artificial
  primer
aagcctcaggcttcaatgcttctgg

SEQ ID NO: 379 - DNA, 25 bp, Artificial
  primer
gcttctggggttgggcatgaggatg

SEQ ID NO: 380 - DNA, 25 bp, Artificial
  primer
tggaagagctgtgtagccctttcta

SEQ ID NO: 381 - DNA, 25 bp, Artificial
  primer
ggcaggaggaggttctcagaatcca

SEQ ID NO: 382 - DNA, 25 bp, Artificial
  primer
agtctgtatctttgctgtatgccaa

SEQ ID NO: 383 - DNA, 25 bp, Artificial
  primer
taaaaatcttctgtacttcactcca

SEQ ID NO: 384 - DNA, 25 bp, Artificial
  primer
acttcactccaaggtacatttgctt

SEQ ID NO: 385 - DNA, 25 bp, Artificial
  primer
cctatttagatccgtcagcccacgg

SEQ ID NO: 386 - DNA, 25 bp, Artificial
  primer
caagcagtcattccctgttatacaa

SEQ ID NO: 387 - DNA, 25 bp, Artificial
  primer
gtcattccctgttatacaagcaaga

SEQ ID NO: 388 - DNA, 25 bp, Artificial
  primer
agacagcaatggggcctttaggcct

SEQ ID NO: 389 - DNA, 25 bp, Artificial
  primer
caggctgcggctggcatatggaggt

SEQ ID NO: 390 - DNA, 25 bp, Artificial
  primer
attggctgccatattgtacctcaga

SEQ ID NO: 391 - DNA, 25 bp, Artificial
  primer
gtacctcagagcactagctcctatc

SEQ ID NO: 392 - DNA, 25 bp, Artificial
  primer
cactagctcctatctggattttccc

SEQ ID NO: 393 - DNA, 25 bp, Artificial
  primer
gcggggttcctagagggtgggagat

SEQ ID NO: 394 - DNA, 25 bp, Artificial
  primer
gagatgggtctccagggatttatcc

SEQ ID NO: 395 - DNA, 25 bp, Artificial
  primer
cctttcccctgatatctatccaata

SEQ ID NO: 396 - DNA, 25 bp, Artificial
  primer
gacaacaatgaagtagcccctgaac

SEQ ID NO: 397 - DNA, 25 bp, Artificial
  primer
gtagcccctgaacagcatggagttg

SEQ ID NO: 398 - DNA, 25 bp, Artificial
  primer
gagttgctgtgagtttgttcgttgc

SEQ ID NO: 399 - DNA, 25 bp, Artificial
  primer
gttcgttgcagacctttgtgttggg

SEQ ID NO: 400 - DNA, 25 bp, Artificial
  primer
ggtcctgggaatctgagctttgttc

SEQ ID NO: 401 - DNA, 25 bp, Artificial
  primer
ctttgttccctgtgcatggtggata

SEQ ID NO: 402 - DNA, 25 bp, Artificial
  primer
gggatagaccttgtgacagaccaat

SEQ ID NO: 403 - DNA, 25 bp, Artificial
  primer
gacagaccaattctgtgacccctgt

SEQ ID NO: 404 - DNA, 25 bp, Artificial
  primer
tgacccctgtcttctgggtcacatt

SEQ ID NO: 405 - DNA, 25 bp, Artificial
  primer
aaatgtgtatgtgtccttgtaaatg

SEQ ID NO: 406 - DNA, 25 bp, Artificial
  primer
gcaagaatgccacgtactcagagta

SEQ ID NO: 407 - DNA, 25 bp, Artificial
  primer
agtgacacagccatccttgggtgta

SEQ ID NO: 408 - DNA, 25 bp, Artificial
  primer
cacagccatccttgggtgtaggcta

SEQ ID NO: 409 - DNA, 25 bp, Artificial
  primer
agtctggccgcgtgctttcggccat

SEQ ID NO: 410 - DNA, 25 bp, Artificial
  primer
gtctggccgcgtgctttcggccatg

SEQ ID NO: 411 - DNA, 25 bp, Artificial
  primer
tggccgcgtgctttcggccatgatc

SEQ ID NO: 412 - DNA, 25 bp, Artificial
  primer
ggccgcgtgctttcggccatgatcc

SEQ ID NO: 413 - DNA, 25 bp, Artificial
  primer
tgctttcggccatgatccggggagc

SEQ ID NO: 414 - DNA, 25 bp, Artificial
  primer
tttcggccatgatccggggagcagc

SEQ ID NO: 415 - DNA, 25 bp, Artificial
  primer
atccggggagcagcagatggctctc

SEQ ID NO: 416 - DNA, 25 bp, Artificial
  primer
gcagcagatggctctcggttccagg

SEQ ID NO: 417 - DNA, 25 bp, Artificial
  primer
cagcagatggctctcggttccaggt

SEQ ID NO: 418 - DNA, 25 bp, Artificial
  primer
agcagatggctctcggttccaggtg

SEQ ID NO: 419 - DNA, 25 bp, Artificial
  primer
atacttcgaggctgatcctccaggg

SEQ ID NO: 420 - DNA, 25 bp, Artificial
  primer
ttcgaggctgatcctccagggcagg

SEQ ID NO: 421 - DNA, 25 bp, Artificial
  primer
tcgaggctgatcctccagggcaggt

SEQ ID NO: 422 - DNA, 25 bp, Artificial
  primer
atcctccagggcaggtggctgcctc

SEQ ID NO: 423 - DNA, 25 bp, Artificial
  primer
catccacagggttctgcctgatcac

SEQ ID NO: 424 - DNA, 25 bp, Artificial
  primer
tgatcacccctggggtaccctgaat

SEQ ID NO: 425 - DNA, 25 bp, Artificial
  primer
taccctgaatcccagtgtgtcctgg

SEQ ID NO: 426 - DNA, 25 bp, Artificial
  primer
tggttggggaacgaggcccatgcca

SEQ ID NO: 427 - DNA, 25 bp, Artificial
  primer
tcaataatcaacccccaggtaccag

SEQ ID NO: 428 - DNA, 25 bp, Artificial
  primer
caggtatcaataacccatttcctcc

SEQ ID NO: 429 - DNA, 25 bp, Artificial
  primer
ctggctcttcttggaacatcccagc

SEQ ID NO: 430 - DNA, 25 bp, Artificial
  primer
ctccaagccctaggttgcagtgggg

SEQ ID NO: 431 - DNA, 25 bp, Artificial
  primer
ttgggagttagagtcctgctcccgc

SEQ ID NO: 432 - DNA, 25 bp, Artificial
  primer
cttgctgtgtgggctcaatccaggc

SEQ ID NO: 433 - DNA, 25 bp, Artificial
  primer
tccaggccctgttaacatgtttcca

SEQ ID NO: 434 - DNA, 25 bp, Artificial
  primer
gcagaacctcagaacgctgtctctg

SEQ ID NO: 435 - DNA, 25 bp, Artificial
  primer
gggtattacacaatggcctcgttat

SEQ ID NO: 436 - DNA, 25 bp, Artificial
  primer
gatggagcatccaactgtggggaag

SEQ ID NO: 437 - DNA, 25 bp, Artificial
  primer
cacacaacgcacatcctgaaggagg

SEQ ID NO: 438 - DNA, 25 bp, Artificial
  primer
cgatgacagggccatcggggagctg

SEQ ID NO: 439 - DNA, 25 bp, Artificial
  primer
tgctcagcgctggagtggtggacca

SEQ ID NO: 440 - DNA, 25 bp, Artificial
  primer
ggaaaagggctcttcctcataacct

SEQ ID NO: 441 - DNA, 25 bp, Artificial
  primer
acctcgatccgaatacactggcaaa

SEQ ID NO: 442 - DNA, 25 bp, Artificial
  primer
tccccagttctgataccactaagaa

SEQ ID NO: 443 - DNA, 25 bp, Artificial
  primer
aactccagatttcttacatggcatc

SEQ ID NO: 444 - DNA, 25 bp, Artificial
  primer
acatggcatctccagaatggctctg

SEQ ID NO: 445 - DNA, 25 bp, Artificial
  primer
aagctatcctttcatcgaggacagc

SEQ ID NO: 446 - DNA, 25 bp, Artificial
  primer
acattatggtacagttggcttggaa

SEQ ID NO: 447 - DNA, 25 bp, Artificial
  primer
ggcttggaattatgtctttctcttt

SEQ ID NO: 448 - DNA, 25 bp, Artificial
  primer
gtgcgtacttgctaagatattcctg

SEQ ID NO: 449 - DNA, 25 bp, Artificial
  primer
gatattcctgtggctcatgcgttac

SEQ ID NO: 450 - DNA, 25 bp, Artificial
  primer
gcgttacaacacgaggacttaagcc

SEQ ID NO: 451 - DNA, 25 bp, Artificial
  primer
aagccagtaatcgtttttgttcaga

SEQ ID NO: 452 - DNA, 25 bp, Artificial
  primer
agaggtgtggaggtagagccagccc

SEQ ID NO: 453 - DNA, 25 bp, Artificial
  primer
tgtctctccagctacattgtaagtt

SEQ ID NO: 454 - DNA, 25 bp, Artificial
  primer
aaatgcccataaaaggtgcccataa

SEQ ID NO: 455 - DNA, 25 bp, Artificial
  primer
agccctctcagacttgagcgttaat

SEQ ID NO: 456 - DNA, 25 bp, Artificial
  primer
tttccctctaagtttacactaacat

SEQ ID NO: 457 - DNA, 25 bp, Artificial
  primer
gtttacactaacatctacccaagat

SEQ ID NO: 458 - DNA, 25 bp, Artificial
  primer
acatctacccaagatagactgtttt

SEQ ID NO: 459 - DNA, 25 bp, Artificial
  primer
acagtcaatttcagttcagctaaca

SEQ ID NO: 460 - DNA, 25 bp, Artificial
  primer
ttgtaactctttgctatggcttttg

SEQ ID NO: 461 - DNA, 25 bp, Artificial
  primer
gctatggcttttgttatcacaccaa

SEQ ID NO: 462 - DNA, 25 bp, Artificial
  primer
gttatcacaccaaaactatgcaatt

SEQ ID NO: 463 - DNA, 25 bp, Artificial
  primer
tatgcaattggtacatggttgttta

SEQ ID NO: 464 - DNA, 25 bp, Artificial
  primer
gaaaccgtatttttccatgataaat

SEQ ID NO: 465 - DNA, 25 bp, Artificial
  primer
gaaatatttggttcatggtatgatc

SEQ ID NO: 466 - DNA, 25 bp, Artificial
  primer
cataattaacacattggctgctagt

SEQ ID NO: 467 - DNA, 25 bp, Artificial
  primer
gcaaaactgttgtaggtgttccttc

SEQ ID NO: 468 - DNA, 25 bp, Artificial
  primer
aagtgtcttcaagtagcagctcttt

SEQ ID NO: 469 - DNA, 25 bp, Artificial
  primer
aacaaacttcagaccttgtctccct

SEQ ID NO: 470 - DNA, 25 bp, Artificial
  primer
ataaagggatagcagcccctcatgc

SEQ ID NO: 471 - DNA, 25 bp, Artificial
  primer
gcaggagctaatgtcaaaccccgaa

SEQ ID NO: 472 - DNA, 25 bp, Artificial
  primer
gaaattccacaccacctagtttggc

SEQ ID NO: 473 - DNA, 25 bp, Artificial
  primer
gccccaggtgtgcttacaaacaaaa

SEQ ID NO: 474 - DNA, 25 bp, Artificial
  primer
gagagctacatagccaggccagatg

SEQ ID NO: 475 - DNA, 25 bp, Artificial
  primer
agatggggactgtgcatcttccctt

SEQ ID NO: 476 - DNA, 25 bp, Artificial
  primer
ggacattcacctggaaacttaccaa

SEQ ID NO: 477 - DNA, 25 bp, Artificial
  primer
gcttggacagctagagcacatcctc

SEQ ID NO: 478 - DNA, 25 bp, Artificial
  primer
gaaagaaattcttctagccatgttg

SEQ ID NO: 479 - DNA, 25 bp, Artificial
  primer
attcttctagccatgttgatggtgg

SEQ ID NO: 480 - DNA, 25 bp, Artificial
  primer
cttctagccatgttgatggtggaca

SEQ ID NO: 481 - DNA, 25 bp, Artificial
  primer
ctagccatgttgatggtggacaagg

SEQ ID NO: 482 - DNA, 25 bp, Artificial
  primer
cggtcaaaactcacgagtctggggg

SEQ ID NO: 483 - DNA, 25 bp, Artificial
  primer
ggtcaaaactcacgagtctggggga

SEQ ID NO: 484 - DNA, 25 bp, Artificial
  primer
gatcacccttcctggacgggactat

SEQ ID NO: 485 - DNA, 25 bp, Artificial
  primer
cacccttcctggacgggactattga

SEQ ID NO: 486 - DNA, 25 bp, Artificial
  primer
ttcctggacgggactattgaaggag

SEQ ID NO: 487 - DNA, 25 bp, Artificial
  primer
ctcccctgggcctgaaaacttggag

SEQ ID NO: 488 - DNA, 25 bp, Artificial
  primer
cctgggcctgaaaacttggagcaat

SEQ ID NO: 489 - DNA, 25 bp, Artificial
  primer
ctgggcctgaaaacttggagcaatt

SEQ ID NO: 490 - DNA, 25 bp, Artificial
  primer
aacacagtggcaagacaacattacc

SEQ ID NO: 491 - DNA, 25 bp, Artificial
  primer
aacattacccaactatagaagagag

SEQ ID NO: 492 - DNA, 25 bp, Artificial
  primer
tacccaactatagaagagaggctaa

SEQ ID NO: 493 - DNA, 25 bp, Artificial
  primer
acccaactatagaagagaggctaac

SEQ ID NO: 494 - DNA, 25 bp, Artificial
  primer
aactctgtttatcaatgtctcctat

SEQ ID NO: 495 - DNA, 25 bp, Artificial
  primer
tcctatattcaaagcccctgcagtg

SEQ ID NO: 496 - DNA, 25 bp, Artificial
  primer
gcagtggtatttgtgtctcgttgca

SEQ ID NO: 497 - DNA, 25 bp, Artificial
  primer
caactttcgttgtgtctcagaattc

SEQ ID NO: 498 - DNA, 25 bp, Artificial
  primer
taagacaagctgctctacccattta

SEQ ID NO: 499 - DNA, 25 bp, Artificial
  primer
acttgcgtgagtcccattattttac

SEQ ID NO: 500 - DNA, 25 bp, Artificial
  primer
tgtgcagatacgttctacccacacg

SEQ ID NO: 501 - DNA, 25 bp, Artificial
  primer
gcgtgcacatggctgtgtgcgtgca

SEQ ID NO: 502 - DNA, 25 bp, Artificial
  primer
agatggactgctttccatgtgtcct

SEQ ID NO: 503 - DNA, 25 bp, Artificial
  primer
ctcttagcagacttcaggcccaaac

SEQ ID NO: 504 - DNA, 25 bp, Artificial
  primer
tctaggttatacttttacctccctg

SEQ ID NO: 505 - DNA, 25 bp, Artificial
  primer
gagttcattgctctcagtataagat

SEQ ID NO: 506 - DNA, 25 bp, Artificial
  primer
aagtctgaggattttcgtcaacctt

SEQ ID NO: 507 - DNA, 25 bp, Artificial
  primer
cgtcaaccttactgaaacacactgg

SEQ ID NO: 508 - DNA, 25 bp, Artificial
  primer
aacacactggtgctttcatcatcag

SEQ ID NO: 509 - DNA, 25 bp, Artificial
  primer
ttgtcgtggttaccagtgcagcctg

SEQ ID NO: 510 - DNA, 25 bp, Artificial
  primer
aaattctgctatttgacacagcttt

SEQ ID NO: 511 - DNA, 25 bp, Artificial
  primer
atggtttcatggacactgttgagca

SEQ ID NO: 512 - DNA, 25 bp, Artificial
  primer
agtgtatggtgtgcttacctgtcca

SEQ ID NO: 513 - DNA, 25 bp, Artificial
  primer
tacctgtccactctagagcattgct

SEQ ID NO: 514 - DNA, 25 bp, Artificial
  primer
gagcattgcttacaggttttttgtt

SEQ ID NO: 515 - DNA, 25 bp, Artificial
  primer
tgctatttcctggtacagtgtagtt

SEQ ID NO: 516 - DNA, 25 bp, Artificial
  primer
cgaaggtgatcatcatccaggcctg

SEQ ID NO: 517 - DNA, 25 bp, Artificial
  primer
acagccctggtgtggtgtggtttaa

SEQ ID NO: 518 - DNA, 25 bp, Artificial
  primer
ggaaacctatctttaccaactacag

SEQ ID NO: 519 - DNA, 25 bp, Artificial
  primer
gaaggattttatcgctttctgctct

SEQ ID NO: 520 - DNA, 25 bp, Artificial
  primer
tttctgctcttccacaccagataat

SEQ ID NO: 521 - DNA, 25 bp, Artificial
  primer
gagacatcccacaatgggctctgtt

SEQ ID NO: 522 - DNA, 25 bp, Artificial
  primer
gaatatgcctgttcctgtgatgtgg

SEQ ID NO: 523 - DNA, 25 bp, Artificial
  primer
tttccgcaaggttcgattttcattt

SEQ ID NO: 524 - DNA, 25 bp, Artificial
  primer
gatggtagagcgcagatgcccacca

SEQ ID NO: 525 - DNA, 25 bp, Artificial
  primer
tgacaagatgtttctacctcttccc

SEQ ID NO: 526 - DNA, 25 bp, Artificial
  primer
ttctacctcttcccaggacattaaa

SEQ ID NO: 527 - DNA, 25 bp, Artificial
  primer
gagctgaggttgacatcacaggcat

SEQ ID NO: 528 - DNA, 25 bp, Artificial
  primer
atcacaggcatgacaatgctgctac

SEQ ID NO: 529 - DNA, 25 bp, Artificial
  primer
gacaatgctgctacaaaatctgggg

SEQ ID NO: 530 - DNA, 25 bp, Artificial
  primer
aaatctggggtacagcgtagatgtg

SEQ ID NO: 531 - DNA, 25 bp, Artificial
  primer
aaaaaaatctcactgcttcggacat

SEQ ID NO: 532 - DNA, 25 bp, Artificial
  primer
tcatgtctcatggtattcgggaagg

SEQ ID NO: 533 - DNA, 25 bp, Artificial
  primer
ggtattcgggaaggcatttgtggga

SEQ ID NO: 534 - DNA, 25 bp, Artificial
  primer
gaagaaacactctgagcaagtccca

SEQ ID NO: 535 - DNA, 25 bp, Artificial
  primer
actacaactcaatgcaatctttaac

SEQ ID NO: 536 - DNA, 25 bp, Artificial
  primer
gttgaataccaagaactgcccaagt

SEQ ID NO: 537 - DNA, 25 bp, Artificial
  primer
accgaaggtgatcatcatccaggcc

SEQ ID NO: 538 - DNA, 25 bp, Artificial
  primer
aatgtttcttggagacatcccacaa

SEQ ID NO: 539 - DNA, 25 bp, Artificial
  primer
ggagacatcccacaatgggctctgt

SEQ ID NO: 540 - DNA, 25 bp, Artificial
  primer
ggctctgtttttattggaagactca

SEQ ID NO: 541 - DNA, 25 bp, Artificial
  primer
ggaagactcattgaacatatgcaag

SEQ ID NO: 542 - DNA, 25 bp, Artificial
  primer
tatgcaagaatatgcctgttcctgt

SEQ ID NO: 543 - DNA, 25 bp, Artificial
  primer
gaggaaattttccgcaaggttcgat

SEQ ID NO: 544 - DNA, 25 bp, Artificial
  primer
aaggttcgattttcatttgagcagc

SEQ ID NO: 545 - DNA, 25 bp, Artificial
  primer
tgagcagccagatggtagagcgcag

SEQ ID NO: 546 - DNA, 25 bp, Artificial
  primer
gatggtagagcgcagatgcccacca

SEQ ID NO: 547 - DNA, 25 bp, Artificial
  primer
gactttgacaagatgtttctacctc

SEQ ID NO: 548 - DNA, 25 bp, Artificial
  primer
ctacctcttcccaggacattaaaat

SEQ ID NO: 549 - DNA, 25 bp, Artificial
  primer
gggattttctacccagagacctgca

SEQ ID NO: 550 - DNA, 25 bp, Artificial
  primer
atgttctctccaacgaccagaatat

SEQ ID NO: 551 - DNA, 25 bp, Artificial
  primer
tgtcaggaccaagattttctaccaa

SEQ ID NO: 552 - DNA, 25 bp, Artificial
  primer
agaagacttttctctggcagactat

SEQ ID NO: 553 - DNA, 25 bp, Artificial
  primer
aaatcagcaacctgcatcttttatg

SEQ ID NO: 554 - DNA, 25 bp, Artificial
  primer
ggaattgcctctggactatcatcaa

SEQ ID NO: 555 - DNA, 25 bp, Artificial
  primer
gaccaagactcccctagagaacaga

SEQ ID NO: 556 - DNA, 25 bp, Artificial
  primer
aagcatatcaaactaccctcatctt

SEQ ID NO: 557 - DNA, 25 bp, Artificial
  primer
gagcactgaattccaagctccactg

SEQ ID NO: 558 - DNA, 25 bp, Artificial
  primer
gctccactggcatttcagtctgacg

SEQ ID NO: 559 - DNA, 25 bp, Artificial
  primer
gtacctgagacatagacgacttttc

SEQ ID NO: 560 - DNA, 25 bp, Artificial
  primer
tacccaatactttctgcatcagcag

SEQ ID NO: 561 - DNA, 25 bp, Artificial
  primer
tctgcatcagcagcctgcaaactgc

SEQ ID NO: 562 - DNA, 25 bp, Artificial
  primer
tgatagatgctgacccatacctcaa

SEQ ID NO: 563 - DNA, 25 bp, Artificial
  primer
ccatcagttattgctggagctgcct

SEQ ID NO: 564 - DNA, 25 bp, Artificial
  primer
tggagctgcctttcatttagcactc

SEQ ID NO: 565 - DNA, 25 bp, Artificial
  primer
tttagcactctacacagtcacggga

SEQ ID NO: 566 - DNA, 25 bp, Artificial
  primer
gtcacgggacaaagctggcctgaat

SEQ ID NO: 567 - DNA, 25 bp, Artificial
  primer
ggaaagtcttaagccttgtctcatg

SEQ ID NO: 568 - DNA, 25 bp, Artificial
  primer
tacctcaaagcaccacagcatgcac

SEQ ID NO: 569 - DNA, 25 bp, Artificial
  primer
aaagtatcatggtgtttctctcctc

SEQ ID NO: 570 - DNA, 25 bp, Artificial
  primer
aaagactgcctttgttttctaagat

SEQ ID NO: 571 - DNA, 25 bp, Artificial
  primer
gaagctgttgcaatggagtcttatg

SEQ ID NO: 572 - DNA, 25 bp, Artificial
  primer
atgttgccaaccatcatagctgaca

SEQ ID NO: 573 - DNA, 25 bp, Artificial
  primer
gctatgacagtgcagacctggtggc

SEQ ID NO: 574 - DNA, 25 bp, Artificial
  primer
gctcagggctgctcacagtgaaggc

SEQ ID NO: 575 - DNA, 25 bp, Artificial
  primer
gaaggcaataccactgctggattgg

SEQ ID NO: 576 - DNA, 25 bp, Artificial
  primer
agatatggctatcctgggtataaca

SEQ ID NO: 577 - DNA, 25 bp, Artificial
  primer
aggtgattctgcgtgtggacaacat

SEQ ID NO: 578 - DNA, 25 bp, Artificial
  primer
ggacaacatcatcaaagcggcaccc

SEQ ID NO: 579 - DNA, 25 bp, Artificial
  primer
acgtgctgtcgatctttggaccagt

SEQ ID NO: 580 - DNA, 25 bp, Artificial
  primer
gaccagtttctagcaaagttgtgtt

SEQ ID NO: 581 - DNA, 25 bp, Artificial
  primer
atttagctgaccttcgctttaacat

SEQ ID NO: 582 - DNA, 25 bp, Artificial
  primer
attcggaactgtgaagcaccttata

SEQ ID NO: 583 - DNA, 25 bp, Artificial
  primer
gttagtagcccaacagatacatcga

SEQ ID NO: 584 - DNA, 25 bp, Artificial
  primer
gccaccatctgccatttgttggttt

SEQ ID NO: 585 - DNA, 25 bp, Artificial
  primer
gtagctgtgtactttctgatcggag

SEQ ID NO: 586 - DNA, 25 bp, Artificial
  primer
gtactttctgatcggagctgtttaa

SEQ ID NO: 587 - DNA, 25 bp, Artificial
  primer
tgtttaagagttacggctggtccca

SEQ ID NO: 588 - DNA, 25 bp, Artificial
  primer
tcccacctcactggatcttgatgtt

SEQ ID NO: 589 - DNA, 25 bp, Artificial
  primer
gaggactctagacaacaacttagca

SEQ ID NO: 590 - DNA, 25 bp, Artificial
  primer
aacacagactgtccaagctctgcag

SEQ ID NO: 591 - DNA, 25 bp, Artificial
  primer
agctctgcagtattcaactgttgat

SEQ ID NO: 592 - DNA, 25 bp, Artificial
  primer
gatggtccactaacagcaagcaaag

SEQ ID NO: 593 - DNA, 25 bp, Artificial
  primer
tgggacttagggatctttcacctgc

SEQ ID NO: 594 - DNA, 25 bp, Artificial
  primer
cctgctgtgcccagtagttctgaag

SEQ ID NO: 595 - DNA, 25 bp, Artificial
  primer
gtttatccctgtttactgaagacca

SEQ ID NO: 596 - DNA, 25 bp, Artificial
  primer
gagacaacttccatgtcttgctctt

SEQ ID NO: 597 - DNA, 25 bp, Artificial
  primer
tcttctacctccctagttagtggaa

SEQ ID NO: 598 - DNA, 25 bp, Artificial
  primer
agggaactgtagggcccagattctg

SEQ ID NO: 599 - DNA, 25 bp, Artificial
  primer
aactgtctctaagctatccatggtc

SEQ ID NO: 600 - DNA, 25 bp, Artificial
  primer
agcagtgaggtcctcattctccagc

SEQ ID NO: 601 - DNA, 25 bp, Artificial
  primer
ctgccctggagaatcatgtgctatg

SEQ ID NO: 602 - DNA, 25 bp, Artificial
  primer
ttgagaactagagtcctcatcccca

SEQ ID NO: 603 - DNA, 25 bp, Artificial
  primer
ttctcatgtagggctctctgtggta

SEQ ID NO: 604 - DNA, 25 bp, Artificial
  primer
gctgcgtcaggagttttgcttcaag

SEQ ID NO: 605 - DNA, 25 bp, Artificial
  primer
agttcagctaagagacacccaggtc

SEQ ID NO: 606 - DNA, 25 bp, Artificial
  primer
gcccttcctgagaccttagaaacca

SEQ ID NO: 607 - DNA, 25 bp, Artificial
  primer
gaaaccagaagagccatacagtcag

SEQ ID NO: 608 - DNA, 25 bp, Artificial
  primer
tacagtcagtggaaggcgggggggc

SEQ ID NO: 609 - DNA, 25 bp, Artificial
  primer
ggatcccagtgggaaccttcatgcc

SEQ ID NO: 610 - DNA, 25 bp, Artificial
  primer
atgggagctggtggcgactgagtcc

SEQ ID NO: 611 - DNA, 25 bp, Artificial
  primer
agtccttctgtacgtgcaactggga

SEQ ID NO: 612 - DNA, 25 bp, Artificial
  primer
ttgtcctttgaggctaggcagctcc

SEQ ID NO: 613 - DNA, 25 bp, Artificial
  primer
tccgtgtgtgtctgttatctggggg

SEQ ID NO: 614 - DNA, 25 bp, Artificial
  primer
cagaccagcgtcacctttgaagtat

SEQ ID NO: 615 - DNA, 25 bp, Artificial
  primer
gtaactctatacacttcaagacttt

SEQ ID NO: 616 - DNA, 25 bp, Artificial
  primer
taatggatctcctatttttctttaa

SEQ ID NO: 617 - DNA, 25 bp, Artificial
  primer
aatgaactattctccttgtaaagct

SEQ ID NO: 618 - DNA, 25 bp, Artificial
  primer
taaagctaaattccccattctgtct

SEQ ID NO: 619 - DNA, 25 bp, Artificial
  primer
aataatcagcattgctccctctttt

SEQ ID NO: 620 - DNA, 25 bp, Artificial
  primer
attgctccctcttttatttaatatt

SEQ ID NO: 621 - DNA, 25 bp, Artificial
  primer
gggtactgattatatccacatggaa

SEQ ID NO: 622 - DNA, 25 bp, Artificial
  primer
aatctactctgcttacattcttgtt

SEQ ID NO: 623 - DNA, 25 bp, Artificial
  primer
gtgtttacacagtttggttcaatta

SEQ ID NO: 624 - DNA, 25 bp, Artificial
  primer
catttggccttttactatgttattt

SEQ ID NO: 625 - DNA, 25 bp, Artificial
  primer
acattatcctccttatttatttttg

SEQ ID NO: 626 - DNA, 25 bp, Artificial
  primer
ctaaagtgactctctgggttgcctg

SEQ ID NO: 627 - DNA, 25 bp, Artificial
  primer
tagaggacagcggctgcctgtccct

SEQ ID NO: 628 - DNA, 25 bp, Artificial
  primer
ctcacccccataatttgtctagatc

SEQ ID NO: 629 - DNA, 25 bp, Artificial
  primer
ggccctgaagtttgagtgcgccctc

SEQ ID NO: 630 - DNA, 25 bp, Artificial
  primer
ggacagcttctgggacacacaaaaa

SEQ ID NO: 631 - DNA, 25 bp, Artificial
  primer
tccctttgtcacttctttggtggtc

SEQ ID NO: 632 - DNA, 25 bp, Artificial
  primer
tcttgcttcatatatcattccttaa

SEQ ID NO: 633 - DNA, 25 bp, Artificial
  primer
aaattccagtcattgttccagcata

SEQ ID NO: 634 - DNA, 25 bp, Artificial
  primer
gccagtagatttgcctagcctgtcc

SEQ ID NO: 635 - DNA, 25 bp, Artificial
  primer
tagcctgtccacttagctgaatacc

SEQ ID NO: 636 - DNA, 25 bp, Artificial
  primer
gtggccacttacaaacttacggagc

SEQ ID NO: 637 - DNA, 25 bp, Artificial
  primer
cagactatcaggcccatttgtctcc

SEQ ID NO: 638 - DNA, 25 bp, Artificial
  primer
tcccctgcaccgagggaacaactcg

SEQ ID NO: 639 - DNA, 25 bp, Artificial
  primer
gaacaactcgagctttgaggcttcc

SEQ ID NO: 640 - DNA, 25 bp, Artificial
  primer
caactaccacttgccagcaacaaaa

SEQ ID NO: 641 - DNA, 25 bp, Artificial
  primer
ccctgcacaggatatcaaagctctg

SEQ ID NO: 642 - DNA, 25 bp, Artificial
  primer
gctctgtttgtgtctgaggaggaga

SEQ ID NO: 643 - DNA, 25 bp, Artificial
  primer
actcggaaggaggtctacatcaaga

SEQ ID NO: 644 - DNA, 25 bp, Artificial
  primer
gaagtcgtttcattcaagttggtgt

SEQ ID NO: 645 - DNA, 25 bp, Artificial
  primer
aagttggtgtaatcagctggggagt

SEQ ID NO: 646 - DNA, 25 bp, Artificial
  primer
gctggggagtagtggatgtctgcaa

SEQ ID NO: 647 - DNA, 25 bp, Artificial
  primer
actttcacatcaacctctttcaagt

SEQ ID NO: 648 - DNA, 25 bp, Artificial
  primer
gacccgcacacggagaagctggcgc

SEQ ID NO: 649 - DNA, 25 bp, Artificial
  primer
cactggcggcaggtgtaccgcctct

SEQ ID NO: 650 - DNA, 25 bp, Artificial
  primer
gccagatcgactacgacttcgtggg

SEQ ID NO: 651 - DNA, 25 bp, Artificial
  primer
gctggagactctggacgaggacgcc

SEQ ID NO: 652 - DNA, 25 bp, Artificial
  primer
ggaggaggactggttcgccaagatc

SEQ ID NO: 653 - DNA, 25 bp, Artificial
  primer
taaactctacgaggccgactttgtt

SEQ ID NO: 654 - DNA, 25 bp, Artificial
  primer
gaaaacctcctccgagactgaaagc

SEQ ID NO: 655 - DNA, 25 bp, Artificial
  primer
aaagctttcgcgttgctttttctcg

SEQ ID NO: 656 - DNA, 25 bp, Artificial
  primer
gcgtgcctggaacctgacgcacgcg

SEQ ID NO: 657 - DNA, 25 bp, Artificial
  primer
tttgcaatctgggcttcttgttcac

SEQ ID NO: 658 - DNA, 25 bp, Artificial
  primer
tccactgcctctatccattgagtac

SEQ ID NO: 659 - DNA, 25 bp, Artificial
  primer
caatctttcatgtcttgtcatacaa

SEQ ID NO: 660 - DNA, 25 bp, Artificial
  primer
acaaatttataaaggtctgcactcc

SEQ ID NO: 661 - DNA, 25 bp, Artificial
  primer
tctgcactcctttatctgtaattgt

SEQ ID NO: 662 - DNA, 25 bp, Artificial
  primer
aaggtttccataagcttggtgacaa

SEQ ID NO: 663 - DNA, 25 bp, Artificial
  primer
atttgcttgcaatctaatctgaact

SEQ ID NO: 664 - DNA, 25 bp, Artificial
  primer
aatctgaactgaccttgaatctttt

SEQ ID NO: 665 - DNA, 25 bp, Artificial
  primer
tatcccatttagtgtgaatattcct

SEQ ID NO: 666 - DNA, 25 bp, Artificial
  primer
tgtgaatattcctttattttgctgc

SEQ ID NO: 667 - DNA, 25 bp, Artificial
  primer
ccacagactgtggtgagggctggtt

SEQ ID NO: 668 - DNA, 25 bp, Artificial
  primer
gagggctggttaatgtagtatggta

SEQ ID NO: 669 - DNA, 25 bp, Artificial
  primer
atatgcacaaaactacttttctaaa

SEQ ID NO: 670 - DNA, 25 bp, Artificial
  primer
tatgcatgatgccattggattcaga

SEQ ID NO: 671 - DNA, 25 bp, Artificial
  primer
ggattcagaagtacattaactggca

SEQ ID NO: 672 - DNA, 25 bp, Artificial
  primer
taactggcaagaactacacaatgga

SEQ ID NO: 673 - DNA, 25 bp, Artificial
  primer
tggtatgaacttttccaacttggca

SEQ ID NO: 674 - DNA, 25 bp, Artificial
  primer
acttggcaactgtacatttccccat

SEQ ID NO: 675 - DNA, 25 bp, Artificial
  primer
atctccgacctgaaatggatgcccc

SEQ ID NO: 676 - DNA, 25 bp, Artificial
  primer
acctgaaatggatgcccctttctgg

SEQ ID NO: 677 - DNA, 25 bp, Artificial
  primer
atgcccctttctggtgtaatcaagg

SEQ ID NO: 678 - DNA, 25 bp, Artificial
  primer
ttctggtgtaatcaaggcgctgcct

SEQ ID NO: 679 - DNA, 25 bp, Artificial
  primer
tgcttttttgagggaattgatgatg

SEQ ID NO: 680 - DNA, 25 bp, Artificial
  primer
aatgggacattagttcaagtagcaa

SEQ ID NO: 681 - DNA, 25 bp, Artificial
  primer
ggaacgcttggaagcccttgatgcc

SEQ ID NO: 682 - DNA, 25 bp, Artificial
  primer
acgcttggaagcccttgatgccaat

SEQ ID NO: 683 - DNA, 25 bp, Artificial
  primer
ttggaagcccttgatgccaattctc

SEQ ID NO: 684 - DNA, 25 bp, Artificial
  primer
cccttgatgccaattctcggaagca

SEQ ID NO: 685 - DNA, 25 bp, Artificial
  primer
gccaattctcggaagcaagaagcag

SEQ ID NO: 686 - DNA, 25 bp, Artificial
  primer
gaatggtatgcaagacaggacgagc

SEQ ID NO: 687 - DNA, 25 bp, Artificial
  primer
gcaagacaggacgagcagctacaga

SEQ ID NO: 688 - DNA, 25 bp, Artificial
  primer
gacaggacgagcagctacagaaaac

SEQ ID NO: 689 - DNA, 25 bp, Artificial
  primer
ggaagcttcccaagagtagcctcaa

SEQ ID NO: 690 - DNA, 25 bp, Artificial
  primer
cttcccaagagtagcctcaacctgt

SEQ ID NO: 691 - DNA, 25 bp, Artificial
  primer
caagagtagcctcaacctgtgcttc

SEQ ID NO: 692 - DNA, 25 bp, Artificial
  primer
ggaatgagttcttatctagtgttgc

SEQ ID NO: 693 - DNA, 25 bp, Artificial
  primer
tcttatctagtgttgcaggccagca

SEQ ID NO: 694 - DNA, 25 bp, Artificial
  primer
ggtttcgagagcattcctactcaca

SEQ ID NO: 695 - DNA, 25 bp, Artificial
  primer
gagcattcctactcacataagtgaa

SEQ ID NO: 696 - DNA, 25 bp, Artificial
  primer
tgagactaggtgctttgcttccttt

SEQ ID NO: 697 - DNA, 25 bp, Artificial
  primer
gcttcctttcatcaggtatctttct

SEQ ID NO: 698 - DNA, 25 bp, Artificial
  primer
aggtatctttctgtggcatttgaga

SEQ ID NO: 699 - DNA, 25 bp, Artificial
  primer
ttactaaattatgaggctttgcttt

SEQ ID NO: 700 - DNA, 25 bp, Artificial
  primer
taactagttttgtcattccatttgt

SEQ ID NO: 701 - DNA, 25 bp, Artificial
  primer
gatacagtcaccaagaatgttttga

SEQ ID NO: 702 - DNA, 25 bp, Artificial
  primer
agaccccaatttaagccttgcttat

SEQ ID NO: 703 - DNA, 25 bp, Artificial
  primer
ggttacgactttggctacttaatca

SEQ ID NO: 704 - DNA, 25 bp, Artificial
  primer
tcctaaccaactctaacttgcctga

SEQ ID NO: 705 - DNA, 25 bp, Artificial
  primer
aggaccacaacatcaggcaggatct

SEQ ID NO: 706 - DNA, 25 bp, Artificial
  primer
ggcaggatctgattcattgctcaca

SEQ ID NO: 707 - DNA, 25 bp, Artificial
  primer
tgctcacaggaatggcctttttcaa

SEQ ID NO: 708 - DNA, 25 bp, Artificial
  primer
gtggtcatttgtatggccttggttc

SEQ ID NO: 709 - DNA, 25 bp, Artificial
  primer
ccttggttctggttcatcctatgta

SEQ ID NO: 710 - DNA, 25 bp, Artificial
  primer
atttcgagctacacacatgcttgta

SEQ ID NO: 711 - DNA, 25 bp, Artificial
  primer
gttttatctctggttgaatccctcg

SEQ ID NO: 712 - DNA, 25 bp, Artificial
  primer
gaatccctcgaacaatagacagtac

SEQ ID NO: 713 - DNA, 25 bp, Artificial
  primer
catggcccattttattgtctgcctt

SEQ ID NO: 714 - DNA, 25 bp, Artificial
  primer
tggagcgaccccattacgctaaaga

SEQ ID NO: 715 - DNA, 25 bp, Artificial
  primer
gagcgaccccattacgctaaagatg

SEQ ID NO: 716 - DNA, 25 bp, Artificial
  primer
gaccccattacgctaaagatgaaag

SEQ ID NO: 717 - DNA, 25 bp, Artificial
  primer
gagccaggatctccactgtggagca

SEQ ID NO: 718 - DNA, 25 bp, Artificial
  primer
gaatgggaaattgcccaggtggacc

SEQ ID NO: 719 - DNA, 25 bp, Artificial
  primer
accccaagaagaccattcagatggg

SEQ ID NO: 720 - DNA, 25 bp, Artificial
  primer
gaccattcagatgggatctttccgg

SEQ ID NO: 721 - DNA, 25 bp, Artificial
  primer
gatgggatctttccggatcaatcca

SEQ ID NO: 722 - DNA, 25 bp, Artificial
  primer
ggatctttccggatcaatccagatg

SEQ ID NO: 723 - DNA, 25 bp, Artificial
  primer
tttccggatcaatccagatggcagc

SEQ ID NO: 724 - DNA, 25 bp, Artificial
  primer
tccagatggcagccagtcagtggtg

SEQ ID NO: 725 - DNA, 25 bp, Artificial
  primer
gccattccccaggctatgaagtgac

SEQ ID NO: 726 - DNA, 25 bp, Artificial
  primer
gcctgtgtacggagcctgatgactt

SEQ ID NO: 727 - DNA, 25 bp, Artificial
  primer
tcactgggagccttctggaatcctg

SEQ ID NO: 728 - DNA, 25 bp, Artificial
  primer
cagggatgttggatgcccacctgtc

SEQ ID NO: 729 - DNA, 25 bp, Artificial
  primer
aattttggttcagccttgacgcgtt

SEQ ID NO: 730 - DNA, 25 bp, Artificial
  primer
ttgacgcgtttgtccaacagctcat

SEQ ID NO: 731 - DNA, 25 bp, Artificial
  primer
ttggctccctttgtatgatatcgtg

SEQ ID NO: 732 - DNA, 25 bp, Artificial
  primer
aatgtttcacagcgatctcagatct

SEQ ID NO: 733 - DNA, 25 bp, Artificial
  primer
tggaagctgttctgcattcactgat

SEQ ID NO: 734 - DNA, 25 bp, Artificial
  primer
gagctaccagccaattgctcttcat

SEQ ID NO: 735 - DNA, 25 bp, Artificial
  primer
agctatctgtcttttagtgccacaa

SEQ ID NO: 736 - DNA, 25 bp, Artificial
  primer
ggagctgctgggacaggggattgat

SEQ ID NO: 737 - DNA, 25 bp, Artificial
  primer
agctcacggctgacgccaagtttga

SEQ ID NO: 738 - DNA, 25 bp, Artificial
  primer
tccagtgcggccaagcacagtgtcg

SEQ ID NO: 739 - DNA, 25 bp, Artificial
  primer
agtgtcgatggcgaatccttgtcca

SEQ ID NO: 740 - DNA, 25 bp, Artificial
  primer
tccttgtccagtgaactgcagcagc

SEQ ID NO: 741 - DNA, 25 bp, Artificial
  primer
agctggggctgcccaaagagcacgc

SEQ ID NO: 742 - DNA, 25 bp, Artificial
  primer
ccagcctgtgccgctgttatgagga

SEQ ID NO: 743 - DNA, 25 bp, Artificial
  primer
caaagccccttgcagaagcacttgc

SEQ ID NO: 744 - DNA, 25 bp, Artificial
  primer
tgaactgctcttcgggaggcagccc

SEQ ID NO: 745 - DNA, 25 bp, Artificial
  primer
gccctggttctaggatgctgaggcc

SEQ ID NO: 746 - DNA, 25 bp, Artificial
  primer
gcctcacttctctcttgagaacttg

SEQ ID NO: 747 - DNA, 25 bp, Artificial
  primer
gacctttttaactctatcattacaa

SEQ ID NO: 748 - DNA, 25 bp, Artificial
  primer
atggcaagtcgtgtgcagttgtctg

SEQ ID NO: 749 - DNA, 25 bp, Artificial
  primer
tgtgcagttgtctggacctcaggag

SEQ ID NO: 750 - DNA, 25 bp, Artificial
  primer
tggtcagtttccatgataaccctga

SEQ ID NO: 751 - DNA, 25 bp, Artificial
  primer
ataacccagccatgcttcataacat

SEQ ID NO: 752 - DNA, 25 bp, Artificial
  primer
ggagatcacagtgaaccctcagttt

SEQ ID NO: 753 - DNA, 25 bp, Artificial
  primer
gaaacaaaccatccagttattcttg

SEQ ID NO: 754 - DNA, 25 bp, Artificial
  primer
aagagaaactaccatcttggccagt

SEQ ID NO: 755 - DNA, 25 bp, Artificial
  primer
gtgacaagtgttcggagggcagcag

SEQ ID NO: 756 - DNA, 25 bp, Artificial
  primer
cagagaggaccaagcctgtgtcacc

SEQ ID NO: 757 - DNA, 25 bp, Artificial
  primer
ttgacatcttcagtcctgtgtgctt

SEQ ID NO: 758 - DNA, 25 bp, Artificial
  primer
aagtgctggtctcggagttgatccc

SEQ ID NO: 759 - DNA, 25 bp, Artificial
  primer
gttgatcccatgggccgttcagaac

SEQ ID NO: 760 - DNA, 25 bp, Artificial
  primer
aacgggcgcagagcccattgtgtcc

SEQ ID NO: 761 - DNA, 25 bp, Artificial
  primer
caacctgtactatgagcggcgctgg

SEQ ID NO: 762 - DNA, 25 bp, Artificial
  primer
aggagctgggcattacagcaccacc

SEQ ID NO: 763 - DNA, 25 bp, Artificial
  primer
tcttctttgaacactgacccttgga

SEQ ID NO: 764 - DNA, 25 bp, Artificial
  primer
ctgagtggccttgaggacgaacccc

SEQ ID NO: 765 - DNA, 25 bp, Artificial
  primer
gcaagcagtacagtggcattcccag

SEQ ID NO: 766 - DNA, 25 bp, Artificial
  primer
gaacagtatcagtcgtctgggctca

SEQ ID NO: 767 - DNA, 25 bp, Artificial
  primer
attgtgcagtgctcctgttgcaact

SEQ ID NO: 768 - DNA, 25 bp, Artificial
  primer
ggagtgagggctacacccaattcca

SEQ ID NO: 769 - DNA, 25 bp, Artificial
  primer
gtttgatgctcgctgggtaacatac

SEQ ID NO: 770 - DNA, 25 bp, Artificial
  primer
tgctcgctgggtaacatacttcaac

SEQ ID NO: 771 - DNA, 25 bp, Artificial
  primer
aacacacttgttacctatgatatgg

SEQ ID NO: 772 - DNA, 25 bp, Artificial
  primer
cctatgatatggttccagagcccaa

SEQ ID NO: 773 - DNA, 25 bp, Artificial
  primer
cggaggaactgggccttgacaaagt

SEQ ID NO: 774 - DNA, 25 bp, Artificial
  primer
gggccttgacaaagtgtaaaccgca

SEQ ID NO: 775 - DNA, 25 bp, Artificial
  primer
gtaaaccgcatggatgggcttcccc

SEQ ID NO: 776 - DNA, 25 bp, Artificial
  primer
ggcttccccaaggatttattgacat

SEQ ID NO: 777 - DNA, 25 bp, Artificial
  primer
ttgctacttgagtgtgaacagttac

SEQ ID NO: 778 - DNA, 25 bp, Artificial
  primer
gaacagttacctggaaatactgatg

SEQ ID NO: 779 - DNA, 25 bp, Artificial
  primer
cctttattgagtaccaagccatgta

SEQ ID NO: 780 - DNA, 25 bp, Artificial
  primer
aaaatcattactctttttctcagta

SEQ ID NO: 781 - DNA, 25 bp, Artificial
  primer
aatattacaataactcttacctaat

SEQ ID NO: 782 - DNA, 25 bp, Artificial
  primer
taactcttacctaattattcttaca

SEQ ID NO: 783 - DNA, 25 bp, Artificial
  primer
agatgtgtgaaatgttctctgcaaa

SEQ ID NO: 784 - DNA, 25 bp, Artificial
  primer
aataattcaggccactgtctccttt

SEQ ID NO: 785 - DNA, 25 bp, Artificial
  primer
gccactgtctccttttatatattat

SEQ ID NO: 786 - DNA, 25 bp, Artificial
  primer
gaagaccagtgaattacgatattta

SEQ ID NO: 787 - DNA, 25 bp, Artificial
  primer
ggtaagttacagcttgttttttgag

SEQ ID NO: 788 - DNA, 25 bp, Artificial
  primer
atgagtttacttttgttcctgttgt

SEQ ID NO: 789 - DNA, 25 bp, Artificial
  primer
tgttcctgttgtttttaactagctt

SEQ ID NO: 790 - DNA, 25 bp, Artificial
  primer
atggaaatgctatacgtttttgaca

SEQ ID NO: 791 - DNA, 25 bp, Artificial
  primer
atattcagataggactgcactacat

SEQ ID NO: 792 - DNA, 25 bp, Artificial
  primer
cagataggactgcactacattattt

SEQ ID NO: 793 - DNA, 25 bp, Artificial
  primer
atctgttaccatcaggtcaattcct

SEQ ID NO: 794 - DNA, 25 bp, Artificial
  primer
gttaccatcaggtcaattcctagta

SEQ ID NO: 795 - DNA, 25 bp, Artificial
  primer
aggtcaattcctagtatgcataaat

SEQ ID NO: 796 - DNA, 25 bp, Artificial
  primer
gagacctatgttgaaaacccctgaa

SEQ ID NO: 797 - DNA, 25 bp, Artificial
  primer
tttttctcagtaaatcatatcatct

SEQ ID NO: 798 - DNA, 25 bp, Artificial
  primer
atttctaggtgctatattaattcaa

SEQ ID NO: 799 - DNA, 25 bp, Artificial
  primer
tgtgaaatgttctctgcaaaataat

SEQ ID NO: 800 - DNA, 25 bp, Artificial
  primer
gcaaaataattcaggccactgtctc

SEQ ID NO: 801 - DNA, 25 bp, Artificial
  primer
tttgcaaaggtaagttacagcttgt

SEQ ID NO: 802 - DNA, 25 bp, Artificial
  primer
atttctaagaccatttcattctgaa

SEQ ID NO: 803 - DNA, 25 bp, Artificial
  primer
tctgaaacttcttatcaattaccta

SEQ ID NO: 804 - DNA, 25 bp, Artificial
  primer
tttcttcttcacaagtcaccaagag

SEQ ID NO: 805 - DNA, 25 bp, Artificial
  primer
ttctccaaaaaataaccttccacag

SEQ ID NO: 806 - DNA, 25 bp, Artificial
  primer
agagacaaactgtccttctatccac

SEQ ID NO: 807 - DNA, 25 bp, Artificial
  primer
cttctatccacttttatcttttaat

SEQ ID NO: 808 - DNA, 25 bp, Artificial
  primer
gcaagggtgcaaagggcctgtgcca

SEQ ID NO: 809 - DNA, 25 bp, Artificial
  primer
gatacaatggcagtcctcaaaggcg

SEQ ID NO: 810 - DNA, 25 bp, Artificial
  primer
aaggcgtaacgagttcatctttctt

SEQ ID NO: 811 - DNA, 25 bp, Artificial
  primer
tcatctttctttcaccataggggtt

SEQ ID NO: 812 - DNA, 25 bp, Artificial
  primer
atagttggcttgtgctactctggaa

SEQ ID NO: 813 - DNA, 25 bp, Artificial
  primer
taactctaccctggcactataatgt

SEQ ID NO: 814 - DNA, 25 bp, Artificial
  primer
gctctactgaggtgctatgttctta

SEQ ID NO: 815 - DNA, 25 bp, Artificial
  primer
tcttagtggatgttctgaccctgct

SEQ ID NO: 816 - DNA, 25 bp, Artificial
  primer
tctgaccctgcttcaaatatttccc

SEQ ID NO: 817 - DNA, 25 bp, Artificial
  primer
ggtactaaggaatctttctgctttg

SEQ ID NO: 818 - DNA, 25 bp, Artificial
  primer
gctttggggtttatcagaattctca

SEQ ID NO: 819 - DNA, 25 bp, Artificial
  primer
aatgctctttacttcatggacttcc

SEQ ID NO: 820 - DNA, 25 bp, Artificial
  primer
ttacttcatggacttccactgccat

SEQ ID NO: 821 - DNA, 25 bp, Artificial
  primer
attctttcagtggctacctacatac

SEQ ID NO: 822 - DNA, 25 bp, Artificial
  primer
gctacctacatacaattccaaacac

SEQ ID NO: 823 - DNA, 25 bp, Artificial
  primer
aatgaggtactctcctggaaatatt

SEQ ID NO: 824 - DNA, 25 bp, Artificial
  primer
ttctttccccaaatatcatgtagca

SEQ ID NO: 825 - DNA, 25 bp, Artificial
  primer
gaaacattcttatgcatcatttggt

SEQ ID NO: 826 - DNA, 25 bp, Artificial
  primer
tacgctatgggatactggcaacagt

SEQ ID NO: 827 - DNA, 25 bp, Artificial
  primer
gcaacagtgcacatatttcataacc

SEQ ID NO: 828 - DNA, 25 bp, Artificial
  primer
ttcataaccaaattagcagcaccgg

SEQ ID NO: 829 - DNA, 25 bp, Artificial
  primer
gcagcaccggtcttaatttgatgtt

SEQ ID NO: 830 - DNA, 25 bp, Artificial
  primer
ggatatgtgtgtttactgtactttt

SEQ ID NO: 831 - DNA, 25 bp, Artificial
  primer
tttgttttgatccgtttgtataaat

SEQ ID NO: 832 - DNA, 25 bp, Artificial
  primer
gatagcaatatcttggacacatttg

SEQ ID NO: 833 - DNA, 25 bp, Artificial
  primer
atacctagcaatcacttttactttt

SEQ ID NO: 834 - DNA, 25 bp, Artificial
  primer
ttttactttttgtaattctgtctct

SEQ ID NO: 835 - DNA, 25 bp, Artificial
  primer
gagacttttctatggttttgtgact

SEQ ID NO: 836 - DNA, 25 bp, Artificial
  primer
gtgactttcaacttttgtacagtta

SEQ ID NO: 837 - DNA, 25 bp, Artificial
  primer
gacaatcagaattccactgcccaaa

SEQ ID NO: 838 - DNA, 25 bp, Artificial
  primer
ggctggttaccatcggagtttacaa

SEQ ID NO: 839 - DNA, 25 bp, Artificial
  primer
tgctttcacgttcttacttgttgta

SEQ ID NO: 840 - DNA, 25 bp, Artificial
  primer
tacattcatgcatttctaggctaga

SEQ ID NO: 841 - DNA, 25 bp, Artificial
  primer
agagaaccttctagatttgatgctt

SEQ ID NO: 842 - DNA, 25 bp, Artificial
  primer
gtctctagaagttatctgtctgtat

SEQ ID NO: 843 - DNA, 25 bp, Artificial
  primer
ctgtctgtattgatctttatgctat

SEQ ID NO: 844 - DNA, 25 bp, Artificial
  primer
gctatattactatctgtggttacag

SEQ ID NO: 845 - DNA, 25 bp, Artificial
  primer
tactggagtcaagcccttataagtc

SEQ ID NO: 846 - DNA, 25 bp, Artificial
  primer
agagagacacagctgcagaggccac

SEQ ID NO: 847 - DNA, 25 bp, Artificial
  primer
acctggattgcgcctaatgtgtttg

SEQ ID NO: 848 - DNA, 25 bp, Artificial
  primer
tgattgaatctacttgcacactctc

SEQ ID NO: 849 - DNA, 25 bp, Artificial
  primer
gcacactctcccattatatttattg

SEQ ID NO: 850 - DNA, 25 bp, Artificial
  primer
aacccaagttagttcaatcctgatt

SEQ ID NO: 851 - DNA, 25 bp, Artificial
  primer
gaaggtttgcagatattctctagtc

SEQ ID NO: 852 - DNA, 25 bp, Artificial
  primer
gacatatcacatgtcagccactgtg

SEQ ID NO: 853 - DNA, 25 bp, Artificial
  primer
atggccagtaagatcaatgtgacgg

SEQ ID NO: 854 - DNA, 25 bp, Artificial
  primer
tgtgacggcagggaaatgtatgtgt

SEQ ID NO: 855 - DNA, 25 bp, Artificial
  primer
cagtgtgtggtcaacatttctcatg

SEQ ID NO: 856 - DNA, 25 bp, Artificial
  primer
atgttaattatgcagtgtttccctc

SEQ ID NO: 857 - DNA, 25 bp, Artificial
  primer
ctgctgcctctgttctggaggacga

SEQ ID NO: 858 - DNA, 25 bp, Artificial
  primer
ttctggaggacgagccttctcctta

SEQ ID NO: 859 - DNA, 25 bp, Artificial
  primer
gctgcccatctttccaggaagtcag

SEQ ID NO: 860 - DNA, 25 bp, Artificial
  primer
agtcagacaactaacgatcatcccc

SEQ ID NO: 861 - DNA, 25 bp, Artificial
  primer
acatcactccagccccataaagagt

SEQ ID NO: 862 - DNA, 25 bp, Artificial
  primer
gtgtcatgttagctgagtcaccatt

SEQ ID NO: 863 - DNA, 25 bp, Artificial
  primer
tcaccatttggcttcggcctggaaa

SEQ ID NO: 864 - DNA, 25 bp, Artificial
  primer
acactgatcgtgtgcgaggccagga

SEQ ID NO: 865 - DNA, 25 bp, Artificial
  primer
aagaccatcctgactaacaaacaca

SEQ ID NO: 866 - DNA, 25 bp, Artificial
  primer
gtctctacggaattccctgtattag

SEQ ID NO: 867 - DNA, 25 bp, Artificial
  primer
ggatgccttttctgtgattgggtgg

SEQ ID NO: 868 - DNA, 25 bp, Artificial
  primer
gtggtgccggacaaaaaactacatg

SEQ ID NO: 869 - DNA, 25 bp, Artificial
  primer
caaaaaactacatggccctttcgtg

SEQ ID NO: 870 - DNA, 25 bp, Artificial
  primer
gggagggatgaattggggtgataga

SEQ ID NO: 871 - DNA, 25 bp, Artificial
  primer
ggtgatagaaccctggtgaattcag

SEQ ID NO: 872 - DNA, 25 bp, Artificial
  primer
gtgaattcagagtaatctttcttta

SEQ ID NO: 873 - DNA, 25 bp, Artificial
  primer
gataggagtttagagaaggcaccaa

SEQ ID NO: 874 - DNA, 25 bp, Artificial
  primer
gaaggcaccaaagctttcactttgg

SEQ ID NO: 875 - DNA, 25 bp, Artificial
  primer
caaagctttcactttggtttggcac

SEQ ID NO: 876 - DNA, 25 bp, Artificial
  primer
cctagctatcttttattggtaaaat

SEQ ID NO: 877 - DNA, 25 bp, Artificial
  primer
tgtataattatgtttgtagagcttt

SEQ ID NO: 878 - DNA, 25 bp, Artificial
  primer
gtttgtagagctttaccaaggagtt

SEQ ID NO: 879 - DNA, 25 bp, Artificial
  primer
ataggttgtctctgcatacacgaac

SEQ ID NO: 880 - DNA, 25 bp, Artificial
  primer
tacacgaacctaacccaaatttgct

SEQ ID NO: 881 - DNA, 25 bp, Artificial
  primer
gatgtcgtgcaaactgtactgtgaa

SEQ ID NO: 882 - DNA, 25 bp, Artificial
  primer
gaggaggatgcatttcaaaagcttg

SEQ ID NO: 883 - DNA, 25 bp, Artificial
  primer
ggttaccattttttgtcagagtgtc

SEQ ID NO: 884 - DNA, 25 bp, Artificial
  primer
agagtgtctgatgcggccactcatt

SEQ ID NO: 885 - DNA, 25 bp, Artificial
  primer
ggctccccagaattcctagactggg

SEQ ID NO: 886 - DNA, 25 bp, Artificial
  primer
aatgacttgagtccagtgaaatctc

SEQ ID NO: 887 - DNA, 25 bp, Artificial
  primer
gtttgactgtaccattgactgttat

SEQ ID NO: 888 - DNA, 25 bp, Artificial
  primer
aagttcagcgttgtatgtctctctc

SEQ ID NO: 889 - DNA, 25 bp, Artificial
  primer
ctctctctacactgtggtgcactta

SEQ ID NO: 890 - DNA, 25 bp, Artificial
  primer
catcgtgatccagcagctctcaaat

SEQ ID NO: 891 - DNA, 25 bp, Artificial
  primer
ctcaaatggcaaatgggtccccttt

SEQ ID NO: 892 - DNA, 25 bp, Artificial
  primer
ggtcccctttgatggcgatgacatt

SEQ ID NO: 893 - DNA, 25 bp, Artificial
  primer
ggagtttgtccgcattgatcctttt

SEQ ID NO: 894 - DNA, 25 bp, Artificial
  primer
gatccttttgtgaggaccttcctga

SEQ ID NO: 895 - DNA, 25 bp, Artificial
  primer
acagtgttcagttcaagttgcccga

SEQ ID NO: 896 - DNA, 25 bp, Artificial
  primer
gttgcccgacgtgtatggtgtattc

SEQ ID NO: 897 - DNA, 25 bp, Artificial
  primer
gattacaaccggctaggctacacac

SEQ ID NO: 898 - DNA, 25 bp, Artificial
  primer
cctgtactcttccactcaggtatcc

SEQ ID NO: 899 - DNA, 25 bp, Artificial
  primer
cacacgcagtatgagcgcttcatcc

SEQ ID NO: 900 - DNA, 25 bp, Artificial
  primer
atggcacaactttacctctgtggga

SEQ ID NO: 901 - DNA, 25 bp, Artificial
  primer
aggacgacgctgtcggaggcaggga

SEQ ID NO: 902 - DNA, 25 bp, Artificial
  primer
gagagcaaattaccacagcttcttg

SEQ ID NO: 903 - DNA, 25 bp, Artificial
  primer
tttgggattgcactgggccatcagc

SEQ ID NO: 904 - DNA, 25 bp, Artificial
  primer
ccatcagctcatgccaggctatggg

SEQ ID NO: 905 - DNA, 25 bp, Artificial
  primer
tgggggcagccagttggcattgctc

SEQ ID NO: 906 - DNA, 25 bp, Artificial
  primer
cattgctccccagactgaacagaaa

SEQ ID NO: 907 - DNA, 25 bp, Artificial
  primer
actgcagtagcatcattgccctaga

SEQ ID NO: 908 - DNA, 25 bp, Artificial
  primer
gtcatctggacagctgttttcctgt

SEQ ID NO: 909 - DNA, 25 bp, Artificial
  primer
agagtctttagacctgtgcacagcc

SEQ ID NO: 910 - DNA, 25 bp, Artificial
  primer
ccaaggggtgctgtatgctctaggc

SEQ ID NO: 911 - DNA, 25 bp, Artificial
  primer
tgaactggctgtgtccatctttgtc

SEQ ID NO: 912 - DNA, 25 bp, Artificial
  primer
ttgtgggacactactctttgttcct

SEQ ID NO: 913 - DNA, 25 bp, Artificial
  primer
cctgacgtcgggcgagcgtgaggag

SEQ ID NO: 914 - DNA, 25 bp, Artificial
  primer
gcgtgaggagagaaccctgcagcgg

SEQ ID NO: 915 - DNA, 25 bp, Artificial
  primer
tggagactcagatgtttcggggctt

SEQ ID NO: 916 - DNA, 25 bp, Artificial
  primer
tctgtttgaggtccgagcccaagag

SEQ ID NO: 917 - DNA, 25 bp, Artificial
  primer
aacactccccagtggagagcacagc

SEQ ID NO: 918 - DNA, 25 bp, Artificial
  primer
aagggaaaacttcctcctagtgcag

SEQ ID NO: 919 - DNA, 25 bp, Artificial
  primer
cctttctgaaaggctgggtcccagg

SEQ ID NO: 920 - DNA, 25 bp, Artificial
  primer
tcccaggttgtcacggtgcggaact

SEQ ID NO: 921 - DNA, 25 bp, Artificial
  primer
agaaagggagcccgagaccaggcgt

SEQ ID NO: 922 - DNA, 25 bp, Artificial
  primer
gtgtcgccgacatgcaaatgggttg

SEQ ID NO: 923 - DNA, 25 bp, Artificial
  primer
tttgttcctgacgtcgggcgagcgt

SEQ ID NO: 924 - DNA, 25 bp, Artificial
  primer
gaggccttccgcaaagctgtctcct

SEQ ID NO: 925 - DNA, 25 bp, Artificial
  primer
tggagactcagatgtttcggggctt

SEQ ID NO: 926 - DNA, 25 bp, Artificial
  primer
ggtccgagcccaagagtatctggaa

SEQ ID NO: 927 - DNA, 25 bp, Artificial
  primer
gagcacagcggtgtcaataagttcc

SEQ ID NO: 928 - DNA, 25 bp, Artificial
  primer
gtcaataagttcctgaagggactag

SEQ ID NO: 929 - DNA, 25 bp, Artificial
  primer
ttcctgaagggactaggcaataaaa

SEQ ID NO: 930 - DNA, 25 bp, Artificial
  primer
caagaaataactctcagcctcaagg

SEQ ID NO: 931 - DNA, 25 bp, Artificial
  primer
taactctcagcctcaagggaaaact

SEQ ID NO: 932 - DNA, 25 bp, Artificial
  primer
ggaaaacttcctcctagtgcagccc

SEQ ID NO: 933 - DNA, 25 bp, Artificial
  primer
gtcccaggttgtcacggtgcggaac

SEQ ID NO: 934 - DNA, 25 bp, Artificial
  primer
tcccaggttgtcacggtgcggaact

SEQ ID NO: 935 - DNA, 25 bp, Artificial
  primer
tctggccgaggctgggctcttccct

SEQ ID NO: 936 - DNA, 25 bp, Artificial
  primer
gggctcttccctggatgaggacctg

SEQ ID NO: 937 - DNA, 25 bp, Artificial
  primer
cgtgtcgccgacatgcaaatgggtt

SEQ ID NO: 938 - DNA, 25 bp, Artificial
  primer
gccgacatgcaaatgggttgttttg

SEQ ID NO: 939 - DNA, 25 bp, Artificial
  primer
ttctcacttttcatccaggaagccg

SEQ ID NO: 940 - DNA, 25 bp, Artificial
  primer
aagagcaagaatcctcctgcaggct

SEQ ID NO: 941 - DNA, 25 bp, Artificial
  primer
gagctacacaccatttctggacttc

SEQ ID NO: 942 - DNA, 25 bp, Artificial
  primer
ggatcagcaaaactgtcagctccca

SEQ ID NO: 943 - DNA, 25 bp, Artificial
  primer
atcctcactctgagtcttggtatcc

SEQ ID NO: 944 - DNA, 25 bp, Artificial
  primer
ggtgtctgagatttggatccctggt

SEQ ID NO: 945 - DNA, 25 bp, Artificial
  primer
gacaccatgctcacagaactgggct

SEQ ID NO: 946 - DNA, 25 bp, Artificial
  primer
ggctcagagctccattttttgcaga

SEQ ID NO: 947 - DNA, 25 bp, Artificial
  primer
tggttagaagctgctgcaactgccc

SEQ ID NO: 948 - DNA, 25 bp, Artificial
  primer
tttgtggtcgaaaggctcagcctct

SEQ ID NO: 949 - DNA, 25 bp, Artificial
  primer
gctcagcctctctacatgaagtctg

SEQ ID NO: 950 - DNA, 25 bp, Artificial
  primer
caggatgctctggatggacaaggaa

SEQ ID NO: 951 - DNA, 25 bp, Artificial
  primer
gcggataagaaggttaggcgagcca

SEQ ID NO: 952 - DNA, 25 bp, Artificial
  primer
ttaggcgagccagaggattgtgctg

SEQ ID NO: 953 - DNA, 25 bp, Artificial
  primer
gtctttcctgtgctctgaagatgcc

SEQ ID NO: 954 - DNA, 25 bp, Artificial
  primer
gaagatgccagctacatcactgggg

SEQ ID NO: 955 - DNA, 25 bp, Artificial
  primer
gtcccgcctctgaggaccgggagac

SEQ ID NO: 956 - DNA, 25 bp, Artificial
  primer
ccttactgttcacctcatcaaatca

SEQ ID NO: 957 - DNA, 25 bp, Artificial
  primer
cctcatcaaatcagttctgccctgt

SEQ ID NO: 958 - DNA, 25 bp, Artificial
  primer
ctgccgtcaaggtggcgtcttactc

SEQ ID NO: 959 - DNA, 25 bp, Artificial
  primer
tgttgtggccttgggtaaaggcctc

SEQ ID NO: 960 - DNA, 25 bp, Artificial
  primer
cctcccctgagaacacaggacaggc

SEQ ID NO: 961 - DNA, 25 bp, Artificial
  primer
aagttcgagttgtgctcttcacgtt

SEQ ID NO: 962 - DNA, 25 bp, Artificial
  primer
tgtgctcttcacgttggttcgataa

SEQ ID NO: 963 - DNA, 25 bp, Artificial
  primer
cacgttggttcgataatggccttta

SEQ ID NO: 964 - DNA, 25 bp, Artificial
  primer
gtaaatattccattctgatttcata

SEQ ID NO: 965 - DNA, 25 bp, Artificial
  primer
attaaacatttatgcctcccttttg

SEQ ID NO: 966 - DNA, 25 bp, Artificial
  primer
cctcccttttgtgttgacactgtag

SEQ ID NO: 967 - DNA, 25 bp, Artificial
  primer
gttgacactgtagctcatactggaa

SEQ ID NO: 968 - DNA, 25 bp, Artificial
  primer
gtgattatcgaccatggtatgcatg

SEQ ID NO: 969 - DNA, 25 bp, Artificial
  primer
ggtatgcatgatcgttgtaattgtt

SEQ ID NO: 970 - DNA, 25 bp, Artificial
  primer
ttttttgtttcagtaccagaggcac

SEQ ID NO: 971 - DNA, 25 bp, Artificial
  primer
gtaccagaggcactgacttcaataa

SEQ ID NO: 972 - DNA, 25 bp, Artificial
  primer
ggagatcatctgacactgctgaacg

SEQ ID NO: 973 - DNA, 25 bp, Artificial
  primer
tgctgaacgtctaccatgcttttaa

SEQ ID NO: 974 - DNA, 25 bp, Artificial
  primer
caacttcattaactacaggtccctg

SEQ ID NO: 975 - DNA, 25 bp, Artificial
  primer
gtacgccagcagctatctcgaatta

SEQ ID NO: 976 - DNA, 25 bp, Artificial
  primer
gatttaatttgcctcgtcgaagtac

SEQ ID NO: 977 - DNA, 25 bp, Artificial
  primer
gcaggtggcacatttagaacgaaca

SEQ ID NO: 978 - DNA, 25 bp, Artificial
  primer
aaccaggtggttcagttgcatccct

SEQ ID NO: 979 - DNA, 25 bp, Artificial
  primer
cctctactgttcttgaccacaaacc

SEQ ID NO: 980 - DNA, 25 bp, Artificial
  primer
ggttggtgaaaattgcccctcaata

SEQ ID NO: 981 - DNA, 25 bp, Artificial
  primer
atgacatgagcaatttcccacagtg

SEQ ID NO: 982 - DNA, 25 bp, Artificial
  primer
gagacagttggaccgcatcattgcc

SEQ ID NO: 983 - DNA, 25 bp, Artificial
  primer
agaggcttcctaaggctgttttctt

SEQ ID NO: 984 - DNA, 25 bp, Artificial
  primer
tttcttagccgtggagaagcccgca

SEQ ID NO: 985 - DNA, 25 bp, Artificial
  primer
ctacatgctcccaagtgctgtcatg

SEQ ID NO: 986 - DNA, 25 bp, Artificial
  primer
catgagcacgttcctgacaagtcag

SEQ ID NO: 987 - DNA, 25 bp, Artificial
  primer
agtcaggtgttcagattgcagtccc

SEQ ID NO: 988 - DNA, 25 bp, Artificial
  primer
ggccaacgtcaggattcttacaggt

SEQ ID NO: 989 - DNA, 25 bp, Artificial
  primer
gaatgttaagctcaccgatcttggc

SEQ ID NO: 990 - DNA, 25 bp, Artificial
  primer
tgcctgctcattttcacacgtgcag

SEQ ID NO: 991 - DNA, 25 bp, Artificial
  primer
gcagtggtgggtctgtctcatagca

SEQ ID NO: 992 - DNA, 25 bp, Artificial
  primer
gtgggcagcggaggctaggggccca

SEQ ID NO: 993 - DNA, 25 bp, Artificial
  primer
ggcagtcccgttttgcagcgggatt

SEQ ID NO: 994 - DNA, 25 bp, Artificial
  primer
gtaacaaaacccaccagaatctaag

SEQ ID NO: 995 - DNA, 25 bp, Artificial
  primer
cagaatctaagcagttttcaccccc

SEQ ID NO: 996 - DNA, 25 bp, Artificial
  primer
ccccctcagaaaccactgtcattag

SEQ ID NO: 997 - DNA, 25 bp, Artificial
  primer
agtaatgttacctatccttgatacc

SEQ ID NO: 998 - DNA, 25 bp, Artificial
  primer
ctatccttgataccatgaccattta

SEQ ID NO: 999 - DNA, 25 bp, Artificial
  primer
gaatagtttgtcatccacttagtgt

SEQ ID NO: 1000 - DNA, 25 bp, Artificial
  primer
cttagtgtgttagctggtggggtac

SEQ ID NO: 1001 - DNA, 25 bp, Artificial
  primer
ggggtacaatataacctctcatctc

SEQ ID NO: 1002 - DNA, 25 bp, Artificial
  primer
ctaagaatcattcctgtactacaga

SEQ ID NO: 1003 - DNA, 25 bp, Artificial
  primer
gatcttcacaaagttgtcttttcac

SEQ ID NO: 1004 - DNA, 25 bp, Artificial
  primer
cactgtgttttgtcaacgtgaaatt

SEQ ID NO: 1005 - DNA, 25 bp, Artificial
  primer
tgctgggacagggacctatggcacc

SEQ ID NO: 1006 - DNA, 25 bp, Artificial
  primer
ggcagcttaggtttgggttaagttg

SEQ ID NO: 1007 - DNA, 25 bp, Artificial
  primer
taagttgtggtgaggggccttgccc

SEQ ID NO: 1008 - DNA, 25 bp, Artificial
  primer
gggtccaacctgacccagtgatctt

SEQ ID NO: 1009 - DNA, 25 bp, Artificial
  primer
ttctttattgtcctgatttgtcctc

SEQ ID NO: 1010 - DNA, 25 bp, Artificial
  primer
tgatttgtcctctttgttggttttt

SEQ ID NO: 1011 - DNA, 25 bp, Artificial
  primer
gaagggcagctgagccaaaggggtc

SEQ ID NO: 1012 - DNA, 25 bp, Artificial
  primer
gggtcagaaattctgccctttgcct

SEQ ID NO: 1013 - DNA, 25 bp, Artificial
  primer
cctccaccacatggcattctggttt

SEQ ID NO: 1014 - DNA, 25 bp, Artificial
  primer
catggcattctggttttggtttctg

SEQ ID NO: 1015 - DNA, 25 bp, Artificial
  primer
ggtctttctatgctggttgtattta

SEQ ID NO: 1016 - DNA, 25 bp, Artificial
  primer
tcagcctccctgctgggacagggac

SEQ ID NO: 1017 - DNA, 25 bp, Artificial
  primer
ccctgctgggacagggacctatggc

SEQ ID NO: 1018 - DNA, 25 bp, Artificial
  primer
agcttagcatgaatcttctttattg

SEQ ID NO: 1019 - DNA, 25 bp, Artificial
  primer
gcttagcatgaatcttctttattgt

SEQ ID NO: 1020 - DNA, 25 bp, Artificial
  primer
agcatgaatcttctttattgtcctg

SEQ ID NO: 1021 - DNA, 25 bp, Artificial
  primer
gcatgaatcttctttattgtcctga

SEQ ID NO: 1022 - DNA, 25 bp, Artificial
  primer
gcagctgagccaaaggggtcagaaa

SEQ ID NO: 1023 - DNA, 25 bp, Artificial
  primer
gggtcagaaattctgccctttgcct

SEQ ID NO: 1024 - DNA, 25 bp, Artificial
  primer
ggtcagaaattctgccctttgcctc

SEQ ID NO: 1025 - DNA, 25 bp, Artificial
  primer
ccaccacatggcattctggttttgg

SEQ ID NO: 1026 - DNA, 25 bp, Artificial
  primer
caccacatggcattctggttttggt

SEQ ID NO: 1027 - DNA, 25 bp, Artificial
  primer
accacatggcattctggttttggtt

SEQ ID NO: 1028 - DNA, 25 bp, Artificial
  primer
ccacatggcattctggttttggttt

SEQ ID NO: 1029 - DNA, 25 bp, Artificial
  primer
cacatggcattctggttttggtttc

SEQ ID NO: 1030 - DNA, 25 bp, Artificial
  primer
acatggcattctggttttggtttct

SEQ ID NO: 1031 - DNA, 25 bp, Artificial
  primer
catggcattctggttttggtttctg

SEQ ID NO: 1032 - DNA, 25 bp, Artificial
  primer
gtgaaccaggagatttagtgctttt

SEQ ID NO: 1033 - DNA, 25 bp, Artificial
  primer
aagcagtttagaaccaaaggcctat

SEQ ID NO: 1034 - DNA, 25 bp, Artificial
  primer
aaggcctatattaataaccgcaact

SEQ ID NO: 1035 - DNA, 25 bp, Artificial
  primer
taaccgcaactatgctgaaaagtac

SEQ ID NO: 1036 - DNA, 25 bp, Artificial
  primer
atcattgttaatacagtcctggcat

SEQ ID NO: 1037 - DNA, 25 bp, Artificial
  primer
agtcctggcattctgtacatatatg

SEQ ID NO: 1038 - DNA, 25 bp, Artificial
  primer
aatactcacatgggcttatgcatta

SEQ ID NO: 1039 - DNA, 25 bp, Artificial
  primer
tgtgctgttccagtatatgcaatac

SEQ ID NO: 1040 - DNA, 25 bp, Artificial
  primer
ggagatgtatacagtctttactata

SEQ ID NO: 1041 - DNA, 25 bp, Artificial
  primer
aatcctgtggtgaatggtggtgtac

SEQ ID NO: 1042 - DNA, 25 bp, Artificial
  primer
agctgtcaccatgttatattttctt

SEQ ID NO: 1043 - DNA, 25 bp, Artificial
  primer
ccatcccatagaagtccagcagaca

SEQ ID NO: 1044 - DNA, 25 bp, Artificial
  primer
agtcaaggagcttctgctttgtccg

SEQ ID NO: 1045 - DNA, 25 bp, Artificial
  primer
ctgaccctctgcagcatggtaacta

SEQ ID NO: 1046 - DNA, 25 bp, Artificial
  primer
agtaacggagacttactcggcttct

SEQ ID NO: 1047 - DNA, 25 bp, Artificial
  primer
agaaagggtgatctgtcccatttcc

SEQ ID NO: 1048 - DNA, 25 bp, Artificial
  primer
ccatttccagtgttcctggcaacct

SEQ ID NO: 1049 - DNA, 25 bp, Artificial
  primer
gcccaacgcagctacgagggtcaca

SEQ ID NO: 1050 - DNA, 25 bp, Artificial
  primer
gagggtcacatactatgctctgtac

SEQ ID NO: 1051 - DNA, 25 bp, Artificial
  primer
ccttgctcccgtctaatatgaccag

SEQ ID NO: 1052 - DNA, 25 bp, Artificial
  primer
tgagctggaataccacactgaccaa

SEQ ID NO: 1053 - DNA, 25 bp, Artificial
  primer
gttgtcactcctaattctcaagtac

SEQ ID NO: 1054 - DNA, 25 bp, Artificial
  primer
tggatttccttgagggagatcagaa

SEQ ID NO: 1055 - DNA, 25 bp, Artificial
  primer
aaacctctggcacagcgcaagaagg

SEQ ID NO: 1056 - DNA, 25 bp, Artificial
  primer
ggagccaaaggccagcagatgagga

SEQ ID NO: 1057 - DNA, 25 bp, Artificial
  primer
ggctcaaagtggaacactcgggaga

SEQ ID NO: 1058 - DNA, 25 bp, Artificial
  primer
cttccgggccaagacagctcatggc

SEQ ID NO: 1059 - DNA, 25 bp, Artificial
  primer
gacagctcatggcagaggcctcaag

SEQ ID NO: 1060 - DNA, 25 bp, Artificial
  primer
gcctcaagaggcctggcaagaaagg

SEQ ID NO: 1061 - DNA, 25 bp, Artificial
  primer
gactcgcaatttcacgacacacttt

SEQ ID NO: 1062 - DNA, 25 bp, Artificial
  primer
acactttgatcccttctgttggtgt

SEQ ID NO: 1063 - DNA, 25 bp, Artificial
  primer
gaagttactttccattgctatctat

SEQ ID NO: 1064 - DNA, 25 bp, Artificial
  primer
agacattgagttcaaattgccttca

SEQ ID NO: 1065 - DNA, 25 bp, Artificial
  primer
atgtaggaacactggagcgcctgcc

SEQ ID NO: 1066 - DNA, 25 bp, Artificial
  primer
aggtcatcgggaaccagagcctggt

SEQ ID NO: 1067 - DNA, 25 bp, Artificial
  primer
ccagagcctggtcaacgagctggcc

SEQ ID NO: 1068 - DNA, 25 bp, Artificial
  primer
ccttcaccgcccacaagatgatggc

SEQ ID NO: 1069 - DNA, 25 bp, Artificial
  primer
gctgacgaggccctggacagtgggc

SEQ ID NO: 1070 - DNA, 25 bp, Artificial
  primer
tcagccgggtgttcccagacaaaga

SEQ ID NO: 1071 - DNA, 25 bp, Artificial
  primer
gaccaccgtgttggtgcagagcacc

SEQ ID NO: 1072 - DNA, 25 bp, Artificial
  primer
gcagagcaccaaggtcaacctgctg

SEQ ID NO: 1073 - DNA, 25 bp, Artificial
  primer
gaacatgagcatgctgcagacccaa

SEQ ID NO: 1074 - DNA, 25 bp, Artificial
  primer
gtccagcccacgactgagaacaagg

SEQ ID NO: 1075 - DNA, 25 bp, Artificial
  primer
gatgacagttgtttctatgccttct

SEQ ID NO: 1076 - DNA, 25 bp, Artificial
  primer
ctgcaagtgaaacctcagcgcctga

SEQ ID NO: 1077 - DNA, 25 bp, Artificial
  primer
agcgcctgatggcagctatgtacac

SEQ ID NO: 1078 - DNA, 25 bp, Artificial
  primer
actggtgatgttctcggtcgagtct

SEQ ID NO: 1079 - DNA, 25 bp, Artificial
  primer
gtcgagtctatgctgtcttgtcaaa

SEQ ID NO: 1080 - DNA, 25 bp, Artificial
  primer
gacatgttcatcatcaaggctgtgc

SEQ ID NO: 1081 - DNA, 25 bp, Artificial
  primer
gccagcccacaactagtattcagcc

SEQ ID NO: 1082 - DNA, 25 bp, Artificial
  primer
tgggagatcattcccagtgacccct

SEQ ID NO: 1083 - DNA, 25 bp, Artificial
  primer
cccttctgggtgccaactactgagg

SEQ ID NO: 1084 - DNA, 25 bp, Artificial
  primer
tgactctgagaaccaagcccggaag

SEQ ID NO: 1085 - DNA, 25 bp, Artificial
  primer
agctacctactactggtggattctt

SEQ ID NO: 1086 - DNA, 25 bp, Artificial
  primer
gccacattatctctgtttattcact

SEQ ID NO: 1087 - DNA, 25 bp, Artificial
  primer
ctcaaagagtatatgttccctccag

SEQ ID NO: 1088 - DNA, 25 bp, Artificial
  primer
cctccttacgctttgtcacacaaaa

SEQ ID NO: 1089 - DNA, 25 bp, Artificial
  primer
aaagtgtctctgccttgagtcatct

SEQ ID NO: 1090 - DNA, 25 bp, Artificial
  primer
gagtcatctattcaagcacttacag

SEQ ID NO: 1091 - DNA, 25 bp, Artificial
  primer
gccacaacagggcattttacaggtg

SEQ ID NO: 1092 - DNA, 25 bp, Artificial
  primer
gtgccctgtaacctgactggttaac

SEQ ID NO: 1093 - DNA, 25 bp, Artificial
  primer
ggttaacagcagtcctttgtaaaca

SEQ ID NO: 1094 - DNA, 25 bp, Artificial
  primer
taaactctcctagtcaatatccacc

SEQ ID NO: 1095 - DNA, 25 bp, Artificial
  primer
atccaccccatccaatttatcaagg

SEQ ID NO: 1096 - DNA, 25 bp, Artificial
  primer
tcagcctacagttatgttcagtcac

SEQ ID NO: 1097 - DNA, 25 bp, Artificial
  primer
tgactcccagatcagtcagagcccc

SEQ ID NO: 1098 - DNA, 25 bp, Artificial
  primer
gaagaccctttaaagcagtgaatct

SEQ ID NO: 1099 - DNA, 25 bp, Artificial
  primer
gaaacaattttcacacccttaagtg

SEQ ID NO: 1100 - DNA, 25 bp, Artificial
  primer
gtggttgatacgtacctattttagg

SEQ ID NO: 1101 - DNA, 25 bp, Artificial
  primer
attactgcgcaagtgtgaatccaaa

SEQ ID NO: 1102 - DNA, 25 bp, Artificial
  primer
attatcgctgagtttttttctgttg

SEQ ID NO: 1103 - DNA, 25 bp, Artificial
  primer
atagcaaactgcttttccattaatg

SEQ ID NO: 1104 - DNA, 25 bp, Artificial
  primer
aatggagaattcatgcctttcaagc

SEQ ID NO: 1105 - DNA, 25 bp, Artificial
  primer
gtaatgactgtgttgacttcaattt

SEQ ID NO: 1106 - DNA, 25 bp, Artificial
  primer
gacttcaattttggagcgcagtagc

SEQ ID NO: 1107 - DNA, 25 bp, Artificial
  primer
tgaactatttggtctcattgaagcc

SEQ ID NO: 1108 - DNA, 25 bp, Artificial
  primer
ggtctcattgaagccaacacagaac

SEQ ID NO: 1109 - DNA, 25 bp, Artificial
  primer
ggtggctgggaaacattcttgtcat

SEQ ID NO: 1110 - DNA, 25 bp, Artificial
  primer
caagacattttgattggcctcctac

SEQ ID NO: 1111 - DNA, 25 bp, Artificial
  primer
ggcctcctacgattacgcaagtgtt

SEQ ID NO: 1112 - DNA, 25 bp, Artificial
  primer
atgggtctgggaaaatcgctgtgat

SEQ ID NO: 1113 - DNA, 25 bp, Artificial
  primer
gatatcaggggtcggcaccaggaat

SEQ ID NO: 1114 - DNA, 25 bp, Artificial
  primer
tcggctacagattacaaggcccgta

SEQ ID NO: 1115 - DNA, 25 bp, Artificial
  primer
agatgctgaaataatggccacacca

SEQ ID NO: 1116 - DNA, 25 bp, Artificial
  primer
atcctccctggcagaacacggagaa

SEQ ID NO: 1117 - DNA, 25 bp, Artificial
  primer
agagcaaatggggggcttcaccctc

SEQ ID NO: 1118 - DNA, 25 bp, Artificial
  primer
gagactggaaactgccttcaaggcc

SEQ ID NO: 1119 - DNA, 25 bp, Artificial
  primer
aaatcacttgcgtttttgaggctta

SEQ ID NO: 1120 - DNA, 25 bp, Artificial
  primer
aaggactggtatctttctgtgagca

SEQ ID NO: 1121 - DNA, 25 bp, Artificial
  primer
gataaagactgcatatccttgtgtc

SEQ ID NO: 1122 - DNA, 25 bp, Artificial
  primer
attgcattgattcttgatgctttct

SEQ ID NO: 1123 - DNA, 25 bp, Artificial
  primer
gatgctttcttagaggcctacatga

SEQ ID NO: 1124 - DNA, 25 bp, Artificial
  primer
gatttcttagattgctctgataaac

SEQ ID NO: 1125 - DNA, 25 bp, Artificial
  primer
agagggaacttttgtcagactctgc

SEQ ID NO: 1126 - DNA, 25 bp, Artificial
  primer
cagactctgcaacaaactcctagct

SEQ ID NO: 1127 - DNA, 25 bp, Artificial
  primer
aactcctagctctatccagagtgtc

SEQ ID NO: 1128 - DNA, 25 bp, Artificial
  primer
tccagagtgtcctctgctgctaaga

SEQ ID NO: 1129 - DNA, 25 bp, Artificial
  primer
gtatctttctcctcaaaagcctgga

SEQ ID NO: 1130 - DNA, 25 bp, Artificial
  primer
gggggtgcattagtcagaattctcc

SEQ ID NO: 1131 - DNA, 25 bp, Artificial
  primer
attggcctgtgattgtttctttttt

SEQ ID NO: 1132 - DNA, 25 bp, Artificial
  primer
gtgattctgtgttcagcactattgt

SEQ ID NO: 1133 - DNA, 25 bp, Artificial
  primer
tgtgatgtgttcaacctctgcactc

SEQ ID NO: 1134 - DNA, 25 bp, Artificial
  primer
ttttagtatactttctcttattctt

SEQ ID NO: 1135 - DNA, 25 bp, Artificial
  primer
taggcttttccgttagttctcaagg

SEQ ID NO: 1136 - DNA, 25 bp, Artificial
  primer
tcaaggatcctcttttggctcttgg

SEQ ID NO: 1137 - DNA, 25 bp, Artificial
  primer
tagaatgcgaactgctttgcctcat

SEQ ID NO: 1138 - DNA, 25 bp, Artificial
  primer
ttgcctcattccatactgatcatcc

SEQ ID NO: 1139 - DNA, 25 bp, Artificial
  primer
tactgatcatcccagctgaacaatt

SEQ ID NO: 1140 - DNA, 25 bp, Artificial
  primer
atttgaaaactgttctgcctttttg

SEQ ID NO: 1141 - DNA, 25 bp, Artificial
  primer
tctgcctttttgttacatgaatctg

SEQ ID NO: 1142 - DNA, 25 bp, Artificial
  primer
gactttgagaacccagtcccataca

SEQ ID NO: 1143 - DNA, 25 bp, Artificial
  primer
ttaaggttggagccatccagcgctg

SEQ ID NO: 1144 - DNA, 25 bp, Artificial
  primer
tacctaggtatgcctggttgcctgc

SEQ ID NO: 1145 - DNA, 25 bp, Artificial
  primer
tggccggggagttcatcagggcctc

SEQ ID NO: 1146 - DNA, 25 bp, Artificial
  primer
gtgggccgagcaatacctgaagatc

SEQ ID NO: 1147 - DNA, 25 bp, Artificial
  primer
gacacggatcgccaggctgattgag

SEQ ID NO: 1148 - DNA, 25 bp, Artificial
  primer
aagagcttaaacatcctgactgcct

SEQ ID NO: 1149 - DNA, 25 bp, Artificial
  primer
aaggctgtctgtgattttccagggt

SEQ ID NO: 1150 - DNA, 25 bp, Artificial
  primer
gaggggagagttaacctgctggctg

SEQ ID NO: 1151 - DNA, 25 bp, Artificial
  primer
ctggctgtgagtcccttgtggaata

SEQ ID NO: 1152 - DNA, 25 bp, Artificial
  primer
tggtactaacccacgattctgagcc

SEQ ID NO: 1153 - DNA, 25 bp, Artificial
  primer
taatattctctttcatgctgaattt

SEQ ID NO: 1154 - DNA, 25 bp, Artificial
  primer
tgctgaatttactatgaccatttat

SEQ ID NO: 1155 - DNA, 25 bp, Artificial
  primer
taagcagtgcagttaactacagata

SEQ ID NO: 1156 - DNA, 25 bp, Artificial
  primer
aactacagatagcatttcaggacaa

SEQ ID NO: 1157 - DNA, 25 bp, Artificial
  primer
agcttacgccatgctatgctataag

SEQ ID NO: 1158 - DNA, 25 bp, Artificial
  primer
gaatatgaggaagttgctgtatgac

SEQ ID NO: 1159 - DNA, 25 bp, Artificial
  primer
gctgtatgacatagtgctggcactg

SEQ ID NO: 1160 - DNA, 25 bp, Artificial
  primer
gtgctggcactgatattatccatca

SEQ ID NO: 1161 - DNA, 25 bp, Artificial
  primer
ctgatattatccatcatctcttttt

SEQ ID NO: 1162 - DNA, 25 bp, Artificial
  primer
gggtatgttgtttcattcaccttga

SEQ ID NO: 1163 - DNA, 25 bp, Artificial
  primer
tagaatctctgaatagctcgctaaa

SEQ ID NO: 1164 - DNA, 25 bp, Artificial
  primer
agagaagggggttttgattgtgata

SEQ ID NO: 1165 - DNA, 25 bp, Artificial
  primer
gagcagttggctacttgattacaac

SEQ ID NO: 1166 - DNA, 25 bp, Artificial
  primer
ttgggctaggatgagctgactccct

SEQ ID NO: 1167 - DNA, 25 bp, Artificial
  primer
atgagctgactcccttagagcaaag

SEQ ID NO: 1168 - DNA, 25 bp, Artificial
  primer
gcaaaggagagacagcccccattac

SEQ ID NO: 1169 - DNA, 25 bp, Artificial
  primer
aaataccatttttgcctggggcttg

SEQ ID NO: 1170 - DNA, 25 bp, Artificial
  primer
ccagcatggcaccttattgttttga

SEQ ID NO: 1171 - DNA, 25 bp, Artificial
  primer
agcaacttcgttgaattttcaccaa

SEQ ID NO: 1172 - DNA, 25 bp, Artificial
  primer
gaattttcaccaacttattacttga

SEQ ID NO: 1173 - DNA, 25 bp, Artificial
  primer
tataatatagcctgtccgtttgctg

SEQ ID NO: 1174 - DNA, 25 bp, Artificial
  primer
gctgtgatatattttcctagtggtt

SEQ ID NO: 1175 - DNA, 25 bp, Artificial
  primer
atacttcaagtctcaggcccttaaa

SEQ ID NO: 1176 - DNA, 25 bp, Artificial
  primer
cttaaatctactccagcttccaggt

SEQ ID NO: 1177 - DNA, 25 bp, Artificial
  primer
tatttttaacactctgcagcagcag

SEQ ID NO: 1178 - DNA, 25 bp, Artificial
  primer
gtagtcctcaacagccaggggagca

SEQ ID NO: 1179 - DNA, 25 bp, Artificial
  primer
caagaacaggccttatctgctcagc

SEQ ID NO: 1180 - DNA, 25 bp, Artificial
  primer
cagtcacaggcagctgcagttgcga

SEQ ID NO: 1181 - DNA, 25 bp, Artificial
  primer
gcagttgcgattcttgcagcatcaa

SEQ ID NO: 1182 - DNA, 25 bp, Artificial
  primer
gcagcagcagcacaaacagctcagc

SEQ ID NO: 1183 - DNA, 25 bp, Artificial
  primer
agctcagctacatcatcatcggcat

SEQ ID NO: 1184 - DNA, 25 bp, Artificial
  primer
tcatcggcatacaggcagccagtca

SEQ ID NO: 1185 - DNA, 25 bp, Artificial
  primer
gtcttgcattactttttgttccttt

SEQ ID NO: 1186 - DNA, 25 bp, Artificial
  primer
cttttttccttagaccttgctgaga

SEQ ID NO: 1187 - DNA, 25 bp, Artificial
  primer
accacacaaatctgtctcctgggtc

SEQ ID NO: 1188 - DNA, 25 bp, Artificial
  primer
taccactccccattagttaatttat

SEQ ID NO: 1189 - DNA, 25 bp, Artificial
  primer
gttgttctctcccttgagtaatctc

SEQ ID NO: 1190 - DNA, 25 bp, Artificial
  primer
acctgccccaggattacacatgggt

SEQ ID NO: 1191 - DNA, 25 bp, Artificial
  primer
ggtagagcctgcaagacctgagacc

SEQ ID NO: 1192 - DNA, 25 bp, Artificial
  primer
gacctgagaccttccaattgctggt

SEQ ID NO: 1193 - DNA, 25 bp, Artificial
  primer
cagagtggcccacagacattgcttt

SEQ ID NO: 1194 - DNA, 25 bp, Artificial
  primer
gaattctacctgtattccagggctg

SEQ ID NO: 1195 - DNA, 25 bp, Artificial
  primer
agggctggaccacttgataacttcc

SEQ ID NO: 1196 - DNA, 25 bp, Artificial
  primer
aacttccagtgtcctggcagctttt

SEQ ID NO: 1197 - DNA, 25 bp, Artificial
  primer
gaacttataaccaatgcactgcacc

SEQ ID NO: 1198 - DNA, 25 bp, Artificial
  primer
tgcaccacatcccagatgtcatcac

SEQ ID NO: 1199 - DNA, 25 bp, Artificial
  primer
tcacctacctttcgagactcagaaa

SEQ ID NO: 1200 - DNA, 25 bp, Artificial
  primer
ttccacaggtgatggccattgccac

SEQ ID NO: 1201 - DNA, 25 bp, Artificial
  primer
ttgccactttggctgcctgttataa

SEQ ID NO: 1202 - DNA, 25 bp, Artificial
  primer
gatggatgccaccaatatgccagct

SEQ ID NO: 1203 - DNA, 25 bp, Artificial
  primer
ttatcatagaatccccgactcagac

SEQ ID NO: 1204 - DNA, 25 bp, Artificial
  primer
ctcagacccatcttctagcaaaaca

SEQ ID NO: 1205 - DNA, 25 bp, Artificial
  primer
aactgtcagctgatttcccgaagcc

SEQ ID NO: 1206 - DNA, 25 bp, Artificial
  primer
acctgtcgtttgtcatgcttttggc

SEQ ID NO: 1207 - DNA, 25 bp, Artificial
  primer
ttgtccatagctgaagtccaccata

SEQ ID NO: 1208 - DNA, 25 bp, Artificial
  primer
gggtgggtgctaatgagcagggccc

SEQ ID NO: 1209 - DNA, 25 bp, Artificial
  primer
agagccctcttgcatgagtttcggc

SEQ ID NO: 1210 - DNA, 25 bp, Artificial
  primer
gttacgtgactgccacattggggct

SEQ ID NO: 1211 - DNA, 25 bp, Artificial
  primer
cattggggcttggaggcatctggca

SEQ ID NO: 1212 - DNA, 25 bp, Artificial
  primer
gaatgggctggcaccacactaatta

SEQ ID NO: 1213 - DNA, 25 bp, Artificial
  primer
aggccacgatgatccagtttgactc

SEQ ID NO: 1214 - DNA, 25 bp, Artificial
  primer
gacaagcgactgagctaggcacggc

SEQ ID NO: 1215 - DNA, 25 bp, Artificial
  primer
ctaggcacggctgactagctctgag

SEQ ID NO: 1216 - DNA, 25 bp, Artificial
  primer
agctctgagctttctgttcatgttt

SEQ ID NO: 1217 - DNA, 25 bp, Artificial
  primer
attcttcattcaattttcagcctgt

SEQ ID NO: 1218 - DNA, 25 bp, Artificial
  primer
ttcagcctgtagtgtcctcaagcag

SEQ ID NO: 1219 - DNA, 25 bp, Artificial
  primer
gtgggttcttattgattcgctgtgt

SEQ ID NO: 1220 - DNA, 25 bp, Artificial
  primer
ctccactgttgccaaactttgtcgc

SEQ ID NO: 1221 - DNA, 25 bp, Artificial
  primer
agggccacttgcttgatttatcatg

SEQ ID NO: 1222 - DNA, 25 bp, Artificial
  primer
gagactgagcgctaggagtgtgtgt

SEQ ID NO: 1223 - DNA, 25 bp, Artificial
  primer
ctgcggcctgatgcatgctggaaaa

SEQ ID NO: 1224 - DNA, 25 bp, Artificial
  primer
gacacgcttttcatttctgatcagt

SEQ ID NO: 1225 - DNA, 25 bp, Artificial
  primer
ttcatcctatatcagcacagctgcc

SEQ ID NO: 1226 - DNA, 25 bp, Artificial
  primer
cagctgccatacttcgacttatcag

SEQ ID NO: 1227 - DNA, 25 bp, Artificial
  primer
atcaggattctggctggtggcctgc

SEQ ID NO: 1228 - DNA, 25 bp, Artificial
  primer
tgcgcgagggtgcagtcttacttaa

SEQ ID NO: 1229 - DNA, 25 bp, Artificial
  primer
gttaattctcactggtatcatcgca

SEQ ID NO: 1230 - DNA, 25 bp, Artificial
  primer
cattgagacatgctacctaggactt

SEQ ID NO: 1231 - DNA, 25 bp, Artificial
  primer
gctacctaggacttaagctgatgaa

SEQ ID NO: 1232 - DNA, 25 bp, Artificial
  primer
agctgatgaagcttggctcctagtg

SEQ ID NO: 1233 - DNA, 25 bp, Artificial
  primer
ttggctcctagtgattggtggccta

SEQ ID NO: 1234 - DNA, 25 bp, Artificial
  primer
gtgattggtggcctattatgataaa

SEQ ID NO: 1235 - DNA, 25 bp, Artificial
  primer
aatatttacttcttaaggctagcgg

SEQ ID NO: 1236 - DNA, 25 bp, Artificial
  primer
aggctagcggaatatccttcctggt

SEQ ID NO: 1237 - DNA, 25 bp, Artificial
  primer
tatccttcctggttctttaatgggt

SEQ ID NO: 1238 - DNA, 25 bp, Artificial
  primer
ggttctttaatgggtagtctatagt

SEQ ID NO: 1239 - DNA, 25 bp, Artificial
  primer
gtaaaccagtctacattttcccatt

SEQ ID NO: 1240 - DNA, 25 bp, Artificial
  primer
ctgtctcatcaaaaactgaagttag

SEQ ID NO: 1241 - DNA, 25 bp, Artificial
  primer
ctggagtccctggtgactccattct

SEQ ID NO: 1242 - DNA, 25 bp, Artificial
  primer
gagtccctggtgactccattctgag

SEQ ID NO: 1243 - DNA, 25 bp, Artificial
  primer
gtccctggtgactccattctgaggt

SEQ ID NO: 1244 - DNA, 25 bp, Artificial
  primer
tccctggtgactccattctgaggtg

SEQ ID NO: 1245 - DNA, 25 bp, Artificial
  primer
ctggtgactccattctgaggtgtca

SEQ ID NO: 1246 - DNA, 25 bp, Artificial
  primer
ggtgactccattctgaggtgtcaca

SEQ ID NO: 1247 - DNA, 25 bp, Artificial
  primer
gactccattctgaggtgtcacaagc

SEQ ID NO: 1248 - DNA, 25 bp, Artificial
  primer
ctccattctgaggtgtcacaagcaa

SEQ ID NO: 1249 - DNA, 25 bp, Artificial
  primer
tccattctgaggtgtcacaagcaat

SEQ ID NO: 1250 - DNA, 25 bp, Artificial
  primer
attctgaggtgtcacaagcaatgaa

SEQ ID NO: 1251 - DNA, 25 bp, Artificial
  primer
ttctgaggtgtcacaagcaatgaag

SEQ ID NO: 1252 - DNA, 25 bp, Artificial
  primer
tctgaggtgtcacaagcaatgaagc

SEQ ID NO: 1253 - DNA, 25 bp, Artificial
  primer
tgaggtgtcacaagcaatgaagcta

SEQ ID NO: 1254 - DNA, 25 bp, Artificial
  primer
aggtgtcacaagcaatgaagctatg

SEQ ID NO: 1255 - DNA, 25 bp, Artificial
  primer
gtgtgacaggggaaccgtagacttt

SEQ ID NO: 1256 - DNA, 25 bp, Artificial
  primer
tgtgacaggggaaccgtagacttta

SEQ ID NO: 1257 - DNA, 25 bp, Artificial
  primer
ccacccaaatgtccttcaaggggcg

SEQ ID NO: 1258 - DNA, 25 bp, Artificial
  primer
gtgatacatccataccatagactac

SEQ ID NO: 1259 - DNA, 25 bp, Artificial
  primer
catagactactccccagcaataaaa

SEQ ID NO: 1260 - DNA, 25 bp, Artificial
  primer
aaatcattcgtgcaacaacttggat

SEQ ID NO: 1261 - DNA, 25 bp, Artificial
  primer
tgctgagtgaaaaacaccaatccta

SEQ ID NO: 1262 - DNA, 25 bp, Artificial
  primer
gggcaacacaagggttccttatagt

SEQ ID NO: 1263 - DNA, 25 bp, Artificial
  primer
gtgccttgactgtggcgatgattac

SEQ ID NO: 1264 - DNA, 25 bp, Artificial
  primer
gaactaccacacaatcaaaggactg

SEQ ID NO: 1265 - DNA, 25 bp, Artificial
  primer
agtggatgacatctatctgaatatc

SEQ ID NO: 1266 - DNA, 25 bp, Artificial
  primer
atatcctggttgtgacattgtggta

SEQ ID NO: 1267 - DNA, 25 bp, Artificial
  primer
gtaaggggtacacgggataattctg

SEQ ID NO: 1268 - DNA, 25 bp, Artificial
  primer
ttaccctcgtggctaagcaagtgtc

SEQ ID NO: 1269 - DNA, 25 bp, Artificial
  primer
gcacacggaagatggcttgttcagc

SEQ ID NO: 1270 - DNA, 25 bp, Artificial
  primer
acctcctgaggatgtgggcagtctc

SEQ ID NO: 1271 - DNA, 25 bp, Artificial
  primer
gcagtctcctccaagaacacatgga

SEQ ID NO: 1272 - DNA, 25 bp, Artificial
  primer
atcccaagcaggtcattgccactgg

SEQ ID NO: 1273 - DNA, 25 bp, Artificial
  primer
tgccactggaaggacatggccccgg

SEQ ID NO: 1274 - DNA, 25 bp, Artificial
  primer
gaaacacacccctcagtgtgtgcct

SEQ ID NO: 1275 - DNA, 25 bp, Artificial
  primer
gtgcctcagtttactttggagatca

SEQ ID NO: 1276 - DNA, 25 bp, Artificial
  primer
gatcagttgtcgtttttagtgctcc

SEQ ID NO: 1277 - DNA, 25 bp, Artificial
  primer
ttttagtgctcctttaggcttacta

SEQ ID NO: 1278 - DNA, 25 bp, Artificial
  primer
gcagaggaattccctaacactgacc

SEQ ID NO: 1279 - DNA, 25 bp, Artificial
  primer
agacctgcaaagctgcttggatttc

SEQ ID NO: 1280 - DNA, 25 bp, Artificial
  primer
tgaaaacctaacctgcaattgatgc

SEQ ID NO: 1281 - DNA, 25 bp, Artificial
  primer
gatgcttaatcatccatccacatga

SEQ ID NO: 1282 - DNA, 25 bp, Artificial
  primer
catgaacatgcagtcagctatacgc

SEQ ID NO: 1283 - DNA, 25 bp, Artificial
  primer
gctatacgcatcaagactcgtttgc

SEQ ID NO: 1284 - DNA, 25 bp, Artificial
  primer
ggtgataacgtctcagagcatgcct

SEQ ID NO: 1285 - DNA, 25 bp, Artificial
  primer
gagcatgcctaaaagagcactgcaa

SEQ ID NO: 1286 - DNA, 25 bp, Artificial
  primer
ttggaatgctgctcagttctctgat

SEQ ID NO: 1287 - DNA, 25 bp, Artificial
  primer
ttctctgatcagtgcttatgttatg

SEQ ID NO: 1288 - DNA, 25 bp, Artificial
  primer
taaccaaagtagatgcctgcagaga

SEQ ID NO: 1289 - DNA, 25 bp, Artificial
  primer
gtatgctgcctgtcagctattctca

SEQ ID NO: 1290 - DNA, 25 bp, Artificial
  primer
aatcctaaatgtgtggtgactgctt

SEQ ID NO: 1291 - DNA, 25 bp, Artificial
  primer
gtgactgctttgtagtgaactttca

SEQ ID NO: 1292 - DNA, 25 bp, Artificial
  primer
aacattctggtagctcagttaataa

SEQ ID NO: 1293 - DNA, 25 bp, Artificial
  primer
ttctatgcaaggtttacttctcaga

SEQ ID NO: 1294 - DNA, 25 bp, Artificial
  primer
gaacagtaggactttgtagttttat

SEQ ID NO: 1295 - DNA, 25 bp, Artificial
  primer
gaaaggttctcttaaaattctatcg

SEQ ID NO: 1296 - DNA, 25 bp, Artificial
  primer
gatattcagggtttggattagcagt

SEQ ID NO: 1297 - DNA, 25 bp, Artificial
  primer
agagatgggcattgtttcccctata

SEQ ID NO: 1298 - DNA, 25 bp, Artificial
  primer
gtttcccctataattgtgctgtttt

SEQ ID NO: 1299 - DNA, 25 bp, Artificial
  primer
ttctggctgtgtttttataacttat

SEQ ID NO: 1300 - DNA, 25 bp, Artificial
  primer
ttaatttgtagccatcttttcccat

SEQ ID NO: 1301 - DNA, 25 bp, Artificial
  primer
cagggggactgcacaattccacctg

SEQ ID NO: 1302 - DNA, 25 bp, Artificial
  primer
gtgaaccccaaatatctgagaccag

SEQ ID NO: 1303 - DNA, 25 bp, Artificial
  primer
gagaccagtctcagtttattttgcc

SEQ ID NO: 1304 - DNA, 25 bp, Artificial
  primer
taaggatgcacctgtgacagcctca

SEQ ID NO: 1305 - DNA, 25 bp, Artificial
  primer
tacattggttcagtcagccttccac

SEQ ID NO: 1306 - DNA, 25 bp, Artificial
  primer
aatacacgattgagtctggcccagt

SEQ ID NO: 1307 - DNA, 25 bp, Artificial
  primer
gcccagtgaatccgcatttttatgt

SEQ ID NO: 1308 - DNA, 25 bp, Artificial
  primer
cagagggatgacttccagttccgtc

SEQ ID NO: 1309 - DNA, 25 bp, Artificial
  primer
ccgtctgtcctttgtccacaaggaa

SEQ ID NO: 1310 - DNA, 25 bp, Artificial
  primer
gaatttccctgggcgctaattatga

SEQ ID NO: 1311 - DNA, 25 bp, Artificial
  primer
gaggcgtgtagcttcttatcattgt

SEQ ID NO: 1312 - DNA, 25 bp, Artificial
  primer
gctgggcaatggagtcagattctct

SEQ ID NO: 1313 - DNA, 25 bp, Artificial
  primer
ggagtcagattctctttcttaaaaa

SEQ ID NO: 1314 - DNA, 25 bp, Artificial
  primer
actggatttccagttctctaatatt

SEQ ID NO: 1315 - DNA, 25 bp, Artificial
  primer
gttctctaatattcttagtaccaca

SEQ ID NO: 1316 - DNA, 25 bp, Artificial
  primer
ttagtaccacaagatatgtcatagg

SEQ ID NO: 1317 - DNA, 25 bp, Artificial
  primer
gaaattcttagctggaaaagtgact

SEQ ID NO: 1318 - DNA, 25 bp, Artificial
  primer
tttttctcctgctacctagtaataa

SEQ ID NO: 1319 - DNA, 25 bp, Artificial
  primer
tctcctgctacctagtaataaacaa

SEQ ID NO: 1320 - DNA, 25 bp, Artificial
  primer
gtttattactggtcacttagaaaat

SEQ ID NO: 1321 - DNA, 25 bp, Artificial
  primer
acctgaggtcgggaagtggatcgcc

SEQ ID NO: 1322 - DNA, 25 bp, Artificial
  primer
aggtcgggaagtggatcgcctgagg

SEQ ID NO: 1323 - DNA, 25 bp, Artificial
  primer
tgggccccactatggtgggcgatga

SEQ ID NO: 1324 - DNA, 25 bp, Artificial
  primer
gaacagtcggatccagagctgatgc

SEQ ID NO: 1325 - DNA, 25 bp, Artificial
  primer
atgaatactacgtcgatgaccctcc

SEQ ID NO: 1326 - DNA, 25 bp, Artificial
  primer
tccccgcatagtcctggacaagctg

SEQ ID NO: 1327 - DNA, 25 bp, Artificial
  primer
caagctggaacgcaggggcttccgt

SEQ ID NO: 1328 - DNA, 25 bp, Artificial
  primer
tgctgagcatgacgggggtgggcca

SEQ ID NO: 1329 - DNA, 25 bp, Artificial
  primer
gccagacgctggtgtggtgtctgca

SEQ ID NO: 1330 - DNA, 25 bp, Artificial
  primer
ggtgtctgcacaaggagtgaccttc

SEQ ID NO: 1331 - DNA, 25 bp, Artificial
  primer
gaccttctcatgctgatttgcagac

SEQ ID NO: 1332 - DNA, 25 bp, Artificial
  primer
ggcagtgaatggccttctctgaaac

SEQ ID NO: 1333 - DNA, 25 bp, Artificial
  primer
ttctctgaaaccctgcgtcaagcag

SEQ ID NO: 1334 - DNA, 25 bp, Artificial
  primer
aatttagtaggttcactgagtaact

SEQ ID NO: 1335 - DNA, 25 bp, Artificial
  primer
gaaggagtcacctgcagtcttttgt

SEQ ID NO: 1336 - DNA, 25 bp, Artificial
  primer
aatacttagaacttagcacttgtgt

SEQ ID NO: 1337 - DNA, 25 bp, Artificial
  primer
gttattgattagtgaggagccagta

SEQ ID NO: 1338 - DNA, 25 bp, Artificial
  primer
gaaacatctgggtatttggaaacaa

SEQ ID NO: 1339 - DNA, 25 bp, Artificial
  primer
gtggtcattgttacattcatctgct

SEQ ID NO: 1340 - DNA, 25 bp, Artificial
  primer
tcatctgctgaacttaacaaaactg

SEQ ID NO: 1341 - DNA, 25 bp, Artificial
  primer
acaggcacaggtgatgcattctcct

SEQ ID NO: 1342 - DNA, 25 bp, Artificial
  primer
acaggtgatgcattctcctgctgtc

SEQ ID NO: 1343 - DNA, 25 bp, Artificial
  primer
ctcagtgctctctttccaatataga

SEQ ID NO: 1344 - DNA, 25 bp, Artificial
  primer
atgtggtcatgtttgacttgtacag

SEQ ID NO: 1345 - DNA, 25 bp, Artificial
  primer
cactgctagcagggcttcaaccagg

SEQ ID NO: 1346 - DNA, 25 bp, Artificial
  primer
ggagaggcttccctgaggacataat

SEQ ID NO: 1347 - DNA, 25 bp, Artificial
  primer
aggtgagaagtgctcccaagcagac

SEQ ID NO: 1348 - DNA, 25 bp, Artificial
  primer
ccaagcagacacaacagcagcacag

SEQ ID NO: 1349 - DNA, 25 bp, Artificial
  primer
agcagcacagaggtctggaggccac

SEQ ID NO: 1350 - DNA, 25 bp, Artificial
  primer
acacaaaaagtgatgctcgccctgg

SEQ ID NO: 1351 - DNA, 25 bp, Artificial
  primer
ggctagcctcagcagacctaaggca

SEQ ID NO: 1352 - DNA, 25 bp, Artificial
  primer
agcagacctaaggcatctctactcc

SEQ ID NO: 1353 - DNA, 25 bp, Artificial
  primer
tctggagatacccagaggtccccca

SEQ ID NO: 1354 - DNA, 25 bp, Artificial
  primer
ccaggtcatcacttggctcagtgga

SEQ ID NO: 1355 - DNA, 25 bp, Artificial
  primer
acttggctcagtggaagccctcttt

SEQ ID NO: 1356 - DNA, 25 bp, Artificial
  primer
aaatccaatcatgagtccaggtaga

SEQ ID NO: 1357 - DNA, 25 bp, Artificial
  primer
aggtagagaacgcctgctgtaatct

SEQ ID NO: 1358 - DNA, 25 bp, Artificial
  primer
gactgcgcattctgtatataactgt

SEQ ID NO: 1359 - DNA, 25 bp, Artificial
  primer
tccagactaggacagcggcatgaac

SEQ ID NO: 1360 - DNA, 25 bp, Artificial
  primer
atgactttggttgggattgcggata

SEQ ID NO: 1361 - DNA, 25 bp, Artificial
  primer
gattgcggatagttagggttacctc

SEQ ID NO: 1362 - DNA, 25 bp, Artificial
  primer
gggttacctctgaatcgtgtagctt

SEQ ID NO: 1363 - DNA, 25 bp, Artificial
  primer
gaatccacattaatgccttgtcgtg

SEQ ID NO: 1364 - DNA, 25 bp, Artificial
  primer
cctgacgatacgctcttctattgtc

SEQ ID NO: 1365 - DNA, 25 bp, Artificial
  primer
gctcttctattgtcttattctggca

SEQ ID NO: 1366 - DNA, 25 bp, Artificial
  primer
tgtgcgagcttctttctgtgtatat

SEQ ID NO: 1367 - DNA, 25 bp, Artificial
  primer
gaagatttagttttcatatcgtata

SEQ ID NO: 1368 - DNA, 25 bp, Artificial
  primer
aatttgtgtcacttactatttttgt

SEQ ID NO: 1369 - DNA, 25 bp, Artificial
  primer
gtactgttatctaagctactgtgtt

SEQ ID NO: 1370 - DNA, 25 bp, Artificial
  primer
agatactgcgaataggccctcaaac

SEQ ID NO: 1371 - DNA, 25 bp, Artificial
  primer
tttgccagttttaaggacatatttt

SEQ ID NO: 1372 - DNA, 25 bp, Artificial
  primer
cactattattgggtttgttttatgc

SEQ ID NO: 1373 - DNA, 25 bp, Artificial
  primer
atgccattattgattcttgatattc

SEQ ID NO: 1374 - DNA, 25 bp, Artificial
  primer
acaatgtagcatatttgattttctt

SEQ ID NO: 1375 - DNA, 25 bp, Artificial
  primer
ttgtgttgtttagctttcatttgct

SEQ ID NO: 1376 - DNA, 25 bp, Artificial
  primer
atgtacctttattttccagtatgcc

SEQ ID NO: 1377 - DNA, 25 bp, Artificial
  primer
tttccagtatgcctacattttgtat

SEQ ID NO: 1378 - DNA, 25 bp, Artificial
  primer
tatcctgctcaaagtaccattatgg

SEQ ID NO: 1379 - DNA, 25 bp, Artificial
  primer
taagattctagttctctcttttctt

SEQ ID NO: 1380 - DNA, 25 bp, Artificial
  primer
cagcttcttggatacagacacaccc

SEQ ID NO: 1381 - DNA, 25 bp, Artificial
  primer
gaaccagtgactttgctgctacata

SEQ ID NO: 1382 - DNA, 25 bp, Artificial
  primer
ttgaccactttgattcttgcttgtt

SEQ ID NO: 1383 - DNA, 25 bp, Artificial
  primer
cttgcttgtttgtctcagttatagg

SEQ ID NO: 1384 - DNA, 25 bp, Artificial
  primer
tttgtacatggtgcctcttgttttc

SEQ ID NO: 1385 - DNA, 25 bp, Artificial
  primer
aaatgtggtgccaaatccctgtttg

SEQ ID NO: 1386 - DNA, 25 bp, Artificial
  primer
ttgccatcgtttttactgtaccgat

SEQ ID NO: 1387 - DNA, 25 bp, Artificial
  primer
gtaatccttagccagtatgttcttt

SEQ ID NO: 1388 - DNA, 25 bp, Artificial
  primer
gaaactgttgcattttgggactttt

SEQ ID NO: 1389 - DNA, 25 bp, Artificial
  primer
ggcttcaccaaggtgtggtttgcca

SEQ ID NO: 1390 - DNA, 25 bp, Artificial
  primer
tagattttaacatcctttgcggtcc

SEQ ID NO: 1391 - DNA, 25 bp, Artificial
  primer
cggtcccagtccaaggtaggctggt

SEQ ID NO: 1392 - DNA, 25 bp, Artificial
  primer
caaggtaggctggtgtcatagtctt

SEQ ID NO: 1393 - DNA, 25 bp, Artificial
  primer
taatccatgaccactgtttttttcc

SEQ ID NO: 1394 - DNA, 25 bp, Artificial
  primer
ttcctatttatatcaccaggtagcc

SEQ ID NO: 1395 - DNA, 25 bp, Artificial
  primer
gtcaatagataagtgtccctgtttt

SEQ ID NO: 1396 - DNA, 25 bp, Artificial
  primer
tgagaagatttattccaccaggggt

SEQ ID NO: 1397 - DNA, 25 bp, Artificial
  primer
tccaccaggggtatttcagctttga

SEQ ID NO: 1398 - DNA, 25 bp, Artificial
  primer
gaaaccaaatctgtgtatctaatac

SEQ ID NO: 1399 - DNA, 25 bp, Artificial
  primer
atgtttgctaaactacccaagtaag

SEQ ID NO: 1400 - DNA, 25 bp, Artificial
  primer
tgtatctctgcctgtgattttcttt

SEQ ID NO: 1401 - DNA, 25 bp, Artificial
  primer
gaaactccatgtagcaaccaggacg

SEQ ID NO: 1402 - DNA, 25 bp, Artificial
  primer
tgtgcctcagcctagatgttttgtc

SEQ ID NO: 1403 - DNA, 25 bp, Artificial
  primer
ttctcttttctgcacttaatacctg

SEQ ID NO: 1404 - DNA, 25 bp, Artificial
  primer
tgacagtatgaccgatctctgcgcc

SEQ ID NO: 1405 - DNA, 25 bp, Artificial
  primer
cgcctttctgggggcgggcaagctg

SEQ ID NO: 1406 - DNA, 25 bp, Artificial
  primer
gctggcggtagatttgtgatgtcac

SEQ ID NO: 1407 - DNA, 25 bp, Artificial
  primer
aacctttattccatgtgctttgctt

SEQ ID NO: 1408 - DNA, 25 bp, Artificial
  primer
cttcattctgtacatagctctttgg

SEQ ID NO: 1409 - DNA, 25 bp, Artificial
  primer
agctctttggctcgtgaacctaatt

SEQ ID NO: 1410 - DNA, 25 bp, Artificial
  primer
agggactgatgttctgtttcttgta

SEQ ID NO: 1411 - DNA, 25 bp, Artificial
  primer
cgccccctatttgtggactaaagat

SEQ ID NO: 1412 - DNA, 25 bp, Artificial
  primer
gatgaactctggtgtgcatgctatt

SEQ ID NO: 1413 - DNA, 25 bp, Artificial
  primer
aaggtctctatattaacgctggttt

SEQ ID NO: 1414 - DNA, 25 bp, Artificial
  primer
tcacatgttttgactctggcttgca

SEQ ID NO: 1415 - DNA, 25 bp, Artificial
  primer
tggcttgcagcaccattcggagtaa

SEQ ID NO: 1416 - DNA, 25 bp, Artificial
  primer
ggagtaaggatgacagcaggcccag

SEQ ID NO: 1417 - DNA, 25 bp, Artificial
  primer
agcaggcccagaaggtgttttactc

SEQ ID NO: 1418 - DNA, 25 bp, Artificial
  primer
cagcaattcactgtcatgcacctat

SEQ ID NO: 1419 - DNA, 25 bp, Artificial
  primer
ttcactgacgttactaagcattgca

SEQ ID NO: 1420 - DNA, 25 bp, Artificial
  primer
aaaccgtatactactttcactgcca

SEQ ID NO: 1421 - DNA, 25 bp, Artificial
  primer
ctactttcactgccatgacactagg

SEQ ID NO: 1422 - DNA, 25 bp, Artificial
  primer
caatctgatttcatcgtcgtggcct

SEQ ID NO: 1423 - DNA, 25 bp, Artificial
  primer
taacacctgcaaccgagggactctg

SEQ ID NO: 1424 - DNA, 25 bp, Artificial
  primer
gactctgcaacaaggacttcttcca

SEQ ID NO: 1425 - DNA, 25 bp, Artificial
  primer
caacatcagcaggggcgacgtcgta

SEQ ID NO: 1426 - DNA, 25 bp, Artificial
  primer
cctgtaccaggccttggccagtggt

SEQ ID NO: 1427 - DNA, 25 bp, Artificial
  primer
gattctgccccacattggcagtgcc

SEQ ID NO: 1428 - DNA, 25 bp, Artificial
  primer
caccatgtccttgttggcagctaac

SEQ ID NO: 1429 - DNA, 25 bp, Artificial
  primer
acaacttgctggctggcctgagagg

SEQ ID NO: 1430 - DNA, 25 bp, Artificial
  primer
acagtacaggtggagggccgggaag

SEQ ID NO: 1431 - DNA, 25 bp, Artificial
  primer
gcaaaccgtgccctggtattgtcag

SEQ ID NO: 1432 - DNA, 25 bp, Artificial
  primer
gacacacccaggcttgatttggatc

SEQ ID NO: 1433 - DNA, 25 bp, Artificial
  primer
agagcacaggggagtcttcttctgt

SEQ ID NO: 1434 - DNA, 25 bp, Artificial
  primer
ccttgggcaatcagcagccttcgtg

SEQ ID NO: 1435 - DNA, 25 bp, Artificial
  primer
caaagttggtagactctctgctcca

SEQ ID NO: 1436 - DNA, 25 bp, Artificial
  primer
ctgctccaggttctcaacgtgaagg

SEQ ID NO: 1437 - DNA, 25 bp, Artificial
  primer
aacccccagctgaaccagcaatgat

SEQ ID NO: 1438 - DNA, 25 bp, Artificial
  primer
agcaatgataatgatggcctctctc

SEQ ID NO: 1439 - DNA, 25 bp, Artificial
  primer
gcaagcatcagttctacggatcatc

SEQ ID NO: 1440 - DNA, 25 bp, Artificial
  primer
tattctgtatctttcatccttgact

SEQ ID NO: 1441 - DNA, 25 bp, Artificial
  primer
cgtgattttcaagcagcatcttctg

SEQ ID NO: 1442 - DNA, 25 bp, Artificial
  primer
gcttttttatatctaggctacctgt

SEQ ID NO: 1443 - DNA, 25 bp, Artificial
  primer
gttggttagattcaaggccccgagc

SEQ ID NO: 1444 - DNA, 25 bp, Artificial
  primer
tcttctctgcattttgtccacatga

SEQ ID NO: 1445 - DNA, 25 bp, Artificial
  primer
tgagaggattacctttccaagccaa

SEQ ID NO: 1446 - DNA, 25 bp, Artificial
  primer
taaacttttttgctccactcaagcc

SEQ ID NO: 1447 - DNA, 25 bp, Artificial
  primer
tcaagcctgttagaatcaccatgga

SEQ ID NO: 1448 - DNA, 25 bp, Artificial
  primer
ggaatacagctccagtgggaaggcc

SEQ ID NO: 1449 - DNA, 25 bp, Artificial
  primer
agctgatgtgcactttgagacccat

SEQ ID NO: 1450 - DNA, 25 bp, Artificial
  primer
gaggatgctgttgcagcgatgctca

SEQ ID NO: 1451 - DNA, 25 bp, Artificial
  primer
gcagcgatgctcaaggatcggtccc

SEQ ID NO: 1452 - DNA, 25 bp, Artificial
  primer
ggtcccacgttcatcataggtatat

SEQ ID NO: 1453 - DNA, 25 bp, Artificial
  primer
aagactctaggggctccagataata

SEQ ID NO: 1454 - DNA, 25 bp, Artificial
  primer
tttgcacatctttcttggacttggg

SEQ ID NO: 1455 - DNA, 25 bp, Artificial
  primer
taccaacgtcaaaggcatctatgca

SEQ ID NO: 1456 - DNA, 25 bp, Artificial
  primer
gcaatagctgctggccgaaaacttg

SEQ ID NO: 1457 - DNA, 25 bp, Artificial
  primer
aacttgcccatcgactttttgaata

SEQ ID NO: 1458 - DNA, 25 bp, Artificial
  primer
caacatcccaactgtggtcttcagc

SEQ ID NO: 1459 - DNA, 25 bp, Artificial
  primer
tattcaacgagctttaccccgatgt

SEQ ID NO: 1460 - DNA, 25 bp, Artificial
  primer
ttaccccgatgtatcacgcagttac

SEQ ID NO: 1461 - DNA, 25 bp, Artificial
  primer
aaatgctgcagggttttgctgttgc

SEQ ID NO: 1462 - DNA, 25 bp, Artificial
  primer
tttgacaacacagtcgccattcacc

SEQ ID NO: 1463 - DNA, 25 bp, Artificial
  primer
ttcaccctacctcttcagaagagct

SEQ ID NO: 1464 - DNA, 25 bp, Artificial
  primer
aagagctggtcacacttcgttgaga

SEQ ID NO: 1465 - DNA, 25 bp, Artificial
  primer
gaaccaggagacacgtgtggcgggc

SEQ ID NO: 1466 - DNA, 25 bp, Artificial
  primer
cccaatgccacaaaaccacatcaga

SEQ ID NO: 1467 - DNA, 25 bp, Artificial
  primer
actgtgcctggctacatttagatct

SEQ ID NO: 1468 - DNA, 25 bp, Artificial
  primer
gagcatctttcctctgttgagtagt

SEQ ID NO: 1469 - DNA, 25 bp, Artificial
  primer
gtggattctctattttattggtcat

SEQ ID NO: 1470 - DNA, 25 bp, Artificial
  primer
caaggctagtgggctttcacactcc

SEQ ID NO: 1471 - DNA, 25 bp, Artificial
  primer
cacactccagactgctgtattccag

SEQ ID NO: 1472 - DNA, 25 bp, Artificial
  primer
ctgtattccagcccaaattactcaa

SEQ ID NO: 1473 - DNA, 25 bp, Artificial
  primer
agctaatgcaatccgcttgccttac

SEQ ID NO: 1474 - DNA, 25 bp, Artificial
  primer
ctcaggttgctgttactctgtttca

SEQ ID NO: 1475 - DNA, 25 bp, Artificial
  primer
ctctgtttcagatgcaaccctctgt

SEQ ID NO: 1476 - DNA, 25 bp, Artificial
  primer
cccaagttctctcattcttagctat

SEQ ID NO: 1477 - DNA, 25 bp, Artificial
  primer
cctagcactgtcctcaaagaccatc

SEQ ID NO: 1478 - DNA, 25 bp, Artificial
  primer
ctcaaagaccatctgtatgccctgc

SEQ ID NO: 1479 - DNA, 25 bp, Artificial
  primer
agctccgtgtgatgcccagtaaagc

SEQ ID NO: 1480 - DNA, 25 bp, Artificial
  primer
tgcccagtaaagcctgaaccatgcc

SEQ ID NO: 1481 - DNA, 25 bp, Artificial
  primer
ctgaggctcccttgaactcaggact

SEQ ID NO: 1482 - DNA, 25 bp, Artificial
  primer
ggggtggtgatcaggcaggttcata

SEQ ID NO: 1483 - DNA, 25 bp, Artificial
  primer
ctcctgtaggccgtctagaactggc

SEQ ID NO: 1484 - DNA, 25 bp, Artificial
  primer
ctcccaggcagactgccttctttca

SEQ ID NO: 1485 - DNA, 25 bp, Artificial
  primer
tctttcaccctgtcctgatagactt

SEQ ID NO: 1486 - DNA, 25 bp, Artificial
  primer
agacttccctgatctagatatcctt

SEQ ID NO: 1487 - DNA, 25 bp, Artificial
  primer
atctagatatccttcgtcatgacac

SEQ ID NO: 1488 - DNA, 25 bp, Artificial
  primer
gtttaccagagccatgcattcacca

SEQ ID NO: 1489 - DNA, 25 bp, Artificial
  primer
tgcattcaccatgcacgatccatct

SEQ ID NO: 1490 - DNA, 25 bp, Artificial
  primer
gtgtcataggacagcggatgcctcg

SEQ ID NO: 1491 - DNA, 25 bp, Artificial
  primer
acagcggatgcctcgatactgtctt

SEQ ID NO: 1492 - DNA, 25 bp, Artificial
  primer
tgggaatactgtcaacctcacaagc

SEQ ID NO: 1493 - DNA, 25 bp, Artificial
  primer
acctcacaagccgaacagaaaccac

SEQ ID NO: 1494 - DNA, 25 bp, Artificial
  primer
aattcagatccacaattccacttgg

SEQ ID NO: 1495 - DNA, 25 bp, Artificial
  primer
tccacttggagcacagaggcccagt

SEQ ID NO: 1496 - DNA, 25 bp, Artificial
  primer
atgcaagtttggtttctatccagaa

SEQ ID NO: 1497 - DNA, 25 bp, Artificial
  primer
acagactaggttccagttttctcct

SEQ ID NO: 1498 - DNA, 25 bp, Artificial
  primer
ccaggagcagttcttccctatggat

SEQ ID NO: 1499 - DNA, 25 bp, Artificial
  primer
acctcaccgcagaggtacttgaact

SEQ ID NO: 1500 - DNA, 25 bp, Artificial
  primer
gaggtacttgaactggcaggaaatg

SEQ ID NO: 1501 - DNA, 25 bp, Artificial
  primer
gaactggcaggaaatgcatcaaaag

SEQ ID NO: 1502 - DNA, 25 bp, Artificial
  primer
agaattggattctctcatcaaggct

SEQ ID NO: 1503 - DNA, 25 bp, Artificial
  primer
ggattctctcatcaaggctacaatt

SEQ ID NO: 1504 - DNA, 25 bp, Artificial
  primer
ctctcatcaaggctacaattgctgg

SEQ ID NO: 1505 - DNA, 25 bp, Artificial
  primer
tcaaggctacaattgctggtggtgg

SEQ ID NO: 1506 - DNA, 25 bp, Artificial
  primer
agtgttggtgattccagtggactgt

SEQ ID NO: 1507 - DNA, 25 bp, Artificial
  primer
gtgattccagtggactgtatctctg

SEQ ID NO: 1508 - DNA, 25 bp, Artificial
  primer
acatttggttttgttcagaccttat

SEQ ID NO: 1509 - DNA, 25 bp, Artificial
  primer
gttttgttcagaccttatttccact

SEQ ID NO: 1510 - DNA, 25 bp, Artificial
  primer
cttgccctacattttgggcatgaca

SEQ ID NO: 1511 - DNA, 25 bp, Artificial
  primer
agatgtgtctttattcagctcgtcg

SEQ ID NO: 1512 - DNA, 25 bp, Artificial
  primer
ttcagctcgtcgtgaagatgctgct

SEQ ID NO: 1513 - DNA, 25 bp, Artificial
  primer
ctgaatgggtcagcatatctctgtt

SEQ ID NO: 1514 - DNA, 25 bp, Artificial
  primer
gcatatctctgtttgcatggtttgc

SEQ ID NO: 1515 - DNA, 25 bp, Artificial
  primer
catggtttgcaggaggtcggttttc

SEQ ID NO: 1516 - DNA, 25 bp, Artificial
  primer
gcaggaggtcggttttcatggtcat

SEQ ID NO: 1517 - DNA, 25 bp, Artificial
  primer
atggtcattcagttccacagatctg

SEQ ID NO: 1518 - DNA, 25 bp, Artificial
  primer
tgaatgattactgtctgtctgtgtc

SEQ ID NO: 1519 - DNA, 25 bp, Artificial
  primer
tttccatgagaaatcactgttgcaa

SEQ ID NO: 1520 - DNA, 25 bp, Artificial
  primer
attgcctataaattgactctactaa

SEQ ID NO: 1521 - DNA, 25 bp, Artificial
  primer
tctgaccccactgatattcctgtgg

SEQ ID NO: 1522 - DNA, 25 bp, Artificial
  primer
accccactgatattcctgtggtgtg

SEQ ID NO: 1523 - DNA, 25 bp, Artificial
  primer
gatccagaaacacgatggcatcacg

SEQ ID NO: 1524 - DNA, 25 bp, Artificial
  primer
tggcatcacggtggcagtgcacaaa

SEQ ID NO: 1525 - DNA, 25 bp, Artificial
  primer
tcagcagcctgtcataggaactgga

SEQ ID NO: 1526 - DNA, 25 bp, Artificial
  primer
actggatcctacctatgttaattac

SEQ ID NO: 1527 - DNA, 25 bp, Artificial
  primer
tgttaattaccttatagaactacta

SEQ ID NO: 1528 - DNA, 25 bp, Artificial
  primer
aagttccagtagttaggccattcat

SEQ ID NO: 1529 - DNA, 25 bp, Artificial
  primer
tagttaggccattcatttaatgtgc

SEQ ID NO: 1530 - DNA, 25 bp, Artificial
  primer
taatgtgcattaggcacttttctgt

SEQ ID NO: 1531 - DNA, 25 bp, Artificial
  primer
atgttttgaagcagcaggtccaggt

SEQ ID NO: 1532 - DNA, 25 bp, Artificial
  primer
cccgcgcgggagagaggccgagatg

SEQ ID NO: 1533 - DNA, 25 bp, Artificial
  primer
gagattgccaaggctcaggtcgctc

SEQ ID NO: 1534 - DNA, 25 bp, Artificial
  primer
ctggtggcgacacgatctttgggaa

SEQ ID NO: 1535 - DNA, 25 bp, Artificial
  primer
ttttgaggatgaccggtgccttgct

SEQ ID NO: 1536 - DNA, 25 bp, Artificial
  primer
cctcaagcaccaacacattttctgg

SEQ ID NO: 1537 - DNA, 25 bp, Artificial
  primer
agaaatgtgctgctgatctgggcct

SEQ ID NO: 1538 - DNA, 25 bp, Artificial
  primer
tggacagtctgtctatcacgttcat

SEQ ID NO: 1539 - DNA, 25 bp, Artificial
  primer
tcacgttcatctccatgttcttgga

SEQ ID NO: 1540 - DNA, 25 bp, Artificial
  primer
caaatgcattggcctcctggttaag

SEQ ID NO: 1541 - DNA, 25 bp, Artificial
  primer
gggataattttctcttctttaggca

SEQ ID NO: 1542 - DNA, 25 bp, Artificial
  primer
aagtaacacacttatttttgcctgt

SEQ ID NO: 1543 - DNA, 25 bp, Artificial
  primer
ccatcatgggcatcgttgctggcct

SEQ ID NO: 1544 - DNA, 25 bp, Artificial
  primer
agctgtggtcaccgctatgatgtgt

SEQ ID NO: 1545 - DNA, 25 bp, Artificial
  primer
gaagagctcaggtggtgtgtgggac

SEQ ID NO: 1546 - DNA, 25 bp, Artificial
  primer
agatgcaggatttcttcacacctct

SEQ ID NO: 1547 - DNA, 25 bp, Artificial
  primer
gtgacttcaagagcctctggcatct

SEQ ID NO: 1548 - DNA, 25 bp, Artificial
  primer
gcatctctttctgcaaaggcgtctg

SEQ ID NO: 1549 - DNA, 25 bp, Artificial
  primer
aaggcgtctgaatgtgtctgcgttc

SEQ ID NO: 1550 - DNA, 25 bp, Artificial
  primer
cgatcatctttcctgttccagagag

SEQ ID NO: 1551 - DNA, 25 bp, Artificial
  primer
agaggtggggctggatgtctccatc

SEQ ID NO: 1552 - DNA, 25 bp, Artificial
  primer
tctccatctctgtctcaaattcatg

SEQ ID NO: 1553 - DNA, 25 bp, Artificial
  primer
gcactgagctgcaacttcttacttc

SEQ ID NO: 1554 - DNA, 25 bp, Artificial
  primer
aactactcatgtgtatggcgccgat

SEQ ID NO: 1555 - DNA, 25 bp, Artificial
  primer
ggcgccgataaatctcgaggactgt

SEQ ID NO: 1556 - DNA, 25 bp, Artificial
  primer
ggttattgctagtttctgttctgtg

SEQ ID NO: 1557 - DNA, 25 bp, Artificial
  primer
ttgcaccccatgctgttgattgcta

SEQ ID NO: 1558 - DNA, 25 bp, Artificial
  primer
gtaacagtctgatcgtgacgctgaa

SEQ ID NO: 1559 - DNA, 25 bp, Artificial
  primer
agttagtctactcttaagccatctt

SEQ ID NO: 1560 - DNA, 25 bp, Artificial
  primer
gccatcttggtaaatttccccaaca

SEQ ID NO: 1561 - DNA, 25 bp, Artificial
  primer
gaattccttcagggtgatgccaggt

SEQ ID NO: 1562 - DNA, 25 bp, Artificial
  primer
aagccattgtcttcggaaaccttgg

SEQ ID NO: 1563 - DNA, 25 bp, Artificial
  primer
gtgattgttggcacatcctatgcaa

SEQ ID NO: 1564 - DNA, 25 bp, Artificial
  primer
gaagcttgtgtatccattatcatgt

SEQ ID NO: 1565 - DNA, 25 bp, Artificial
  primer
ccatctggaccataatagggacacc

SEQ ID NO: 1566 - DNA, 25 bp, Artificial
  primer
cggttaagagtctgtgctggttgcc

SEQ ID NO: 1567 - DNA, 25 bp, Artificial
  primer
gagaacagttgtccaggatgctggc

SEQ ID NO: 1568 - DNA, 25 bp, Artificial
  primer
acaacctgctggcccgaaacaaggc

SEQ ID NO: 1569 - DNA, 25 bp, Artificial
  primer
aacaaggctgccaggtgtggaacag

SEQ ID NO: 1570 - DNA, 25 bp, Artificial
  primer
aacagcccatgctgactggggacat

SEQ ID NO: 1571 - DNA, 25 bp, Artificial
  primer
gactggggacatacacttgcatctt

SEQ ID NO: 1572 - DNA, 25 bp, Artificial
  primer
ccccattaaggcagctcatccaagc

SEQ ID NO: 1573 - DNA, 25 bp, Artificial
  primer
gacatgttagtttttcttacttgca

SEQ ID NO: 1574 - DNA, 25 bp, Artificial
  primer
cagagatactgttgtcaccttctgg

SEQ ID NO: 1575 - DNA, 25 bp, Artificial
  primer
ggggagtgcatttagacttatgtgg

SEQ ID NO: 1576 - DNA, 25 bp, Artificial
  primer
ccggctatgggctcgagccgagttc

SEQ ID NO: 1577 - DNA, 25 bp, Artificial
  primer
gggcgccaaggagcagagggactcg

SEQ ID NO: 1578 - DNA, 25 bp, Artificial
  primer
ggactcggacttggcggccgagagt

SEQ ID NO: 1579 - DNA, 25 bp, Artificial
  primer
ggccgagagtaacttccggatctac

SEQ ID NO: 1580 - DNA, 25 bp, Artificial
  primer
tctacccctggatgcgaagctcagg

SEQ ID NO: 1581 - DNA, 25 bp, Artificial
  primer
caggaactgaccgcaaacgaggccg

SEQ ID NO: 1582 - DNA, 25 bp, Artificial
  primer
cgctaccagaccctggagctggaga

SEQ ID NO: 1583 - DNA, 25 bp, Artificial
  primer
agaatttcactacaatcgctacctg

SEQ ID NO: 1584 - DNA, 25 bp, Artificial
  primer
acgctctgcctcacggaaagacaga

SEQ ID NO: 1585 - DNA, 25 bp, Artificial
  primer
accaccggccaagacagggctgaag

SEQ ID NO: 1586 - DNA, 25 bp, Artificial
  primer
gcccagctctgggaactgaatcagg

SEQ ID NO: 1587 - DNA, 25 bp, Artificial
  primer
ttaggtgatagccaatccttctctc

SEQ ID NO: 1588 - DNA, 25 bp, Artificial
  primer
tcgaacggactcagataccaccaca

SEQ ID NO: 1589 - DNA, 25 bp, Artificial
  primer
gaggagtgggtctaacacaggcctg

SEQ ID NO: 1590 - DNA, 25 bp, Artificial
  primer
tttacttggaagaggctccgctcgc

SEQ ID NO: 1591 - DNA, 25 bp, Artificial
  primer
ctccgctcgcattcaagacagtatg

SEQ ID NO: 1592 - DNA, 25 bp, Artificial
  primer
ggttttatcatggcagccttcatcc

SEQ ID NO: 1593 - DNA, 25 bp, Artificial
  primer
ggtcattgccttctgcaagaactgt

SEQ ID NO: 1594 - DNA, 25 bp, Artificial
  primer
catctaccccttgtgcaatgagaac

SEQ ID NO: 1595 - DNA, 25 bp, Artificial
  primer
gagaattctgcatattcgctcctaa

SEQ ID NO: 1596 - DNA, 25 bp, Artificial
  primer
ccaggcaggcacctgggctttctgg

SEQ ID NO: 1597 - DNA, 25 bp, Artificial
  primer
gaatccaaaccacagtcttaggggc

SEQ ID NO: 1598 - DNA, 25 bp, Artificial
  primer
gaagggggccttttgagctagaagc

SEQ ID NO: 1599 - DNA, 25 bp, Artificial
  primer
tagaagctttctattctgatcccca

SEQ ID NO: 1600 - DNA, 25 bp, Artificial
  primer
gatccccaaggagttccatatccag

SEQ ID NO: 1601 - DNA, 25 bp, Artificial
  primer
aataggccgctttgtagttcagaat

SEQ ID NO: 1602 - DNA, 25 bp, Artificial
  primer
gtcaacacccatggcattttcacca

SEQ ID NO: 1603 - DNA, 25 bp, Artificial
  primer
gtgaagctggaacacagccccaggt

SEQ ID NO: 1604 - DNA, 25 bp, Artificial
  primer
agccccaggtacaaactgatgctca

SEQ ID NO: 1605 - DNA, 25 bp, Artificial
  primer
tgatgctcaacaaacctcacagtct

SEQ ID NO: 1606 - DNA, 25 bp, Artificial
  primer
cccttcacctgaacttacctcagaa

SEQ ID NO: 1607 - DNA, 25 bp, Artificial
  primer
aaagttgaccagcctccagaagcta

SEQ ID NO: 1608 - DNA, 25 bp, Artificial
  primer
gagctgcctattgaagccaacttgg

SEQ ID NO: 1609 - DNA, 25 bp, Artificial
  primer
cccctcaggacccagggaatgccag

SEQ ID NO: 1610 - DNA, 25 bp, Artificial
  primer
gccagggacattttcaagacacaga

SEQ ID NO: 1611 - DNA, 25 bp, Artificial
  primer
ccctgtttccaatgccaattcatct

SEQ ID NO: 1612 - DNA, 25 bp, Artificial
  primer
atgccaattcatctcagcaatcaca

SEQ ID NO: 1613 - DNA, 25 bp, Artificial
  primer
cacaagccaaggtctgaacccttcc

SEQ ID NO: 1614 - DNA, 25 bp, Artificial
  primer
tgggtgttcaaggcccttacaccct

SEQ ID NO: 1615 - DNA, 25 bp, Artificial
  primer
ccagcagctcaccatggctttaaaa

SEQ ID NO: 1616 - DNA, 25 bp, Artificial
  primer
ggctttaaaacatgctctcttagat

SEQ ID NO: 1617 - DNA, 25 bp, Artificial
  primer
tcaggagaaactcgggcactcccta

SEQ ID NO: 1618 - DNA, 25 bp, Artificial
  primer
actccctaagtccactctagttgtg

SEQ ID NO: 1619 - DNA, 25 bp, Artificial
  primer
tagttgtggacttttccccattgac

SEQ ID NO: 1620 - DNA, 25 bp, Artificial
  primer
gcaacgtccgacagaacgaggggac

SEQ ID NO: 1621 - DNA, 25 bp, Artificial
  primer
gaggggacgtaacggaggcaggttg

SEQ ID NO: 1622 - DNA, 25 bp, Artificial
  primer
cggaggcaggttggagccgctgccg

SEQ ID NO: 1623 - DNA, 25 bp, Artificial
  primer
gctcgcccgccagaagaatatgaaa

SEQ ID NO: 1624 - DNA, 25 bp, Artificial
  primer
aagcgccgagatgacgggctttctg

SEQ ID NO: 1625 - DNA, 25 bp, Artificial
  primer
ccgcccgcaagcagagggactcgga

SEQ ID NO: 1626 - DNA, 25 bp, Artificial
  primer
gggactcggagatcatgcagcagaa

SEQ ID NO: 1627 - DNA, 25 bp, Artificial
  primer
ggaacccaagtagctttgtggcttc

SEQ ID NO: 1628 - DNA, 25 bp, Artificial
  primer
tcctcctgtagtgctcacaggtccc

SEQ ID NO: 1629 - DNA, 25 bp, Artificial
  primer
cttcccagtgttttttattcctgtg

SEQ ID NO: 1630 - DNA, 25 bp, Artificial
  primer
ttattcctgtggggctcaccccaaa

SEQ ID NO: 1631 - DNA, 25 bp, Artificial
  primer
acagtgaagtgtgaggcccacccta

SEQ ID NO: 1632 - DNA, 25 bp, Artificial
  primer
gcccaccctagagccaaggtgacgc

SEQ ID NO: 1633 - DNA, 25 bp, Artificial
  primer
gtgacgctgaatggggttccagccc

SEQ ID NO: 1634 - DNA, 25 bp, Artificial
  primer
tatacacaagaaccagacccgggag

SEQ ID NO: 1635 - DNA, 25 bp, Artificial
  primer
gtccgggaaactggacgtggccaga

SEQ ID NO: 1636 - DNA, 25 bp, Artificial
  primer
cattgcccgagctcaagtgtctaaa

SEQ ID NO: 1637 - DNA, 25 bp, Artificial
  primer
taaaggatggcactttcccactgcc

SEQ ID NO: 1638 - DNA, 25 bp, Artificial
  primer
agtgactgtcactcgagatcttgag

SEQ ID NO: 1639 - DNA, 25 bp, Artificial
  primer
cgagatcttgagggcacctacctct

SEQ ID NO: 1640 - DNA, 25 bp, Artificial
  primer
gagcactcaaggggaggtcacccgc

SEQ ID NO: 1641 - DNA, 25 bp, Artificial
  primer
ccccccggtatgagattgtcatcat

SEQ ID NO: 1642 - DNA, 25 bp, Artificial
  primer
tcatcacttccttctggttttatgt

SEQ ID NO: 1643 - DNA, 25 bp, Artificial
  primer
ttccgatccaccactgtactagtaa

SEQ ID NO: 1644 - DNA, 25 bp, Artificial
  primer
gtcttccatgaacctgcaattgttt

SEQ ID NO: 1645 - DNA, 25 bp, Artificial
  primer
tatgcgtcagcattttccaatttcc

SEQ ID NO: 1646 - DNA, 25 bp, Artificial
  primer
aggttggatctagagctgctgttga

SEQ ID NO: 1647 - DNA, 25 bp, Artificial
  primer
gctgctgttgatcactcaggcatac

SEQ ID NO: 1648 - DNA, 25 bp, Artificial
  primer
gtccaagctgcagtccatgagcaat

SEQ ID NO: 1649 - DNA, 25 bp, Artificial
  primer
catgagcaataacagactaccccag

SEQ ID NO: 1650 - DNA, 25 bp, Artificial
  primer
gactaccccagatactgcagtttac

SEQ ID NO: 1651 - DNA, 25 bp, Artificial
  primer
gaaagtcttcttttttgaccagttg

SEQ ID NO: 1652 - DNA, 25 bp, Artificial
  primer
gagggagcatgtgacacagccagta

SEQ ID NO: 1653 - DNA, 25 bp, Artificial
  primer
aatgtctgcgtttcttagttcgtct

SEQ ID NO: 1654 - DNA, 25 bp, Artificial
  primer
agttcgtctctgcacagatcttgga

SEQ ID NO: 1655 - DNA, 25 bp, Artificial
  primer
gggaacagcgcataaagtcaggcag

SEQ ID NO: 1656 - DNA, 25 bp, Artificial
  primer
gggctcccgtggcaaaagagaagga

SEQ ID NO: 1657 - DNA, 25 bp, Artificial
  primer
gtgctagcggtgatagtggccagaa

SEQ ID NO: 1658 - DNA, 25 bp, Artificial
  primer
ggtgaacgactaagtgccagactca

SEQ ID NO: 1659 - DNA, 25 bp, Artificial
  primer
aagtgccagactcagagctttacct

SEQ ID NO: 1660 - DNA, 25 bp, Artificial
  primer
aaatagatgcctcctatgtggaccc

SEQ ID NO: 1661 - DNA, 25 bp, Artificial
  primer
cccacttggccctcaaatagaacga

SEQ ID NO: 1662 - DNA, 25 bp, Artificial
  primer
gaaattgccttatgagatcatcctc

SEQ ID NO: 1663 - DNA, 25 bp, Artificial
  primer
agatcatcctcatgttaaaccttgg

SEQ ID NO: 1664 - DNA, 25 bp, Artificial
  primer
tgcgcgagggagcaggttctccgca

SEQ ID NO: 1665 - DNA, 25 bp, Artificial
  primer
cccagcttcccaggagagaccaaag

SEQ ID NO: 1666 - DNA, 25 bp, Artificial
  primer
gagaccaaaggcttctgagcaggat

SEQ ID NO: 1667 - DNA, 25 bp, Artificial
  primer
gtgagctgcctggaatacatgtggt

SEQ ID NO: 1668 - DNA, 25 bp, Artificial
  primer
catacccaaagctctctgtcaatta

SEQ ID NO: 1669 - DNA, 25 bp, Artificial
  primer
gcttctcctggcgtgggagacgtct

SEQ ID NO: 1670 - DNA, 25 bp, Artificial
  primer
agacaccagcgtttgggcttctaac

SEQ ID NO: 1671 - DNA, 25 bp, Artificial
  primer
gctgctctgcacacatggacaggga

SEQ ID NO: 1672 - DNA, 25 bp, Artificial
  primer
gagatgctgagcccagcgaatcctc

SEQ ID NO: 1673 - DNA, 25 bp, Artificial
  primer
ccagcgaatcctctccattgaagga

SEQ ID NO: 1674 - DNA, 25 bp, Artificial
  primer
actcaactcagtgccattttacgaa

SEQ ID NO: 1675 - DNA, 25 bp, Artificial
  primer
gtgtttctgagactttgatcacctg

SEQ ID NO: 1676 - DNA, 25 bp, Artificial
  primer
tgatcacctgaactttctctagcaa

SEQ ID NO: 1677 - DNA, 25 bp, Artificial
  primer
ggagtgtggttccaagagatccatc

SEQ ID NO: 1678 - DNA, 25 bp, Artificial
  primer
gcctgtgccataaaatgtgcttctc

SEQ ID NO: 1679 - DNA, 25 bp, Artificial
  primer
tcttcgggatgttgtttgctgtctg

SEQ ID NO: 1680 - DNA, 25 bp, Artificial
  primer
gatctttgtagactgttcctgtttg

SEQ ID NO: 1681 - DNA, 25 bp, Artificial
  primer
agactgttcctgtttgctgggagct

SEQ ID NO: 1682 - DNA, 25 bp, Artificial
  primer
ctctgctgcttaaattgttcgtcct

SEQ ID NO: 1683 - DNA, 25 bp, Artificial
  primer
cctcctatcgttggtttgtctagaa

SEQ ID NO: 1684 - DNA, 25 bp, Artificial
  primer
gtctagaacactcagctgcttcttt

SEQ ID NO: 1685 - DNA, 25 bp, Artificial
  primer
ctaactttatgaactccctctgtgt

SEQ ID NO: 1686 - DNA, 25 bp, Artificial
  primer
agagctctgccctgaggatataaac

SEQ ID NO: 1687 - DNA, 25 bp, Artificial
  primer
attactgtcatatgcttcctattgc

SEQ ID NO: 1688 - DNA, 25 bp, Artificial
  primer
gggggaatccagacgagtggcacag

SEQ ID NO: 1689 - DNA, 25 bp, Artificial
  primer
gaagcccgaatgaccctagaaacga

SEQ ID NO: 1690 - DNA, 25 bp, Artificial
  primer
aatcctgacagcatatgccagcgcc

SEQ ID NO: 1691 - DNA, 25 bp, Artificial
  primer
gccagcgccgtaggaataggaacca

SEQ ID NO: 1692 - DNA, 25 bp, Artificial
  primer
ataggaaccactcaggtgcagccag

SEQ ID NO: 1693 - DNA, 25 bp, Artificial
  primer
gcagcgagagtcccggacttgtcta

SEQ ID NO: 1694 - DNA, 25 bp, Artificial
  primer
tattctttccatttgctatcatgtc

SEQ ID NO: 1695 - DNA, 25 bp, Artificial
  primer
gaacgccaggagtgctttctttgca

SEQ ID NO: 1696 - DNA, 25 bp, Artificial
  primer
gatctctactactgttgattttgcc

SEQ ID NO: 1697 - DNA, 25 bp, Artificial
  primer
gttcatccggcctgagggagagatc

SEQ ID NO: 1698 - DNA, 25 bp, Artificial
  primer
tcatccggcctgagggagagatcac

SEQ ID NO: 1699 - DNA, 25 bp, Artificial
  primer
ccggcctgagggagagatcaccgat

SEQ ID NO: 1700 - DNA, 25 bp, Artificial
  primer
ccaggctagagatcctgcagctcct

SEQ ID NO: 1701 - DNA, 25 bp, Artificial
  primer
tagagatcctgcagctcctgaaagg

SEQ ID NO: 1702 - DNA, 25 bp, Artificial
  primer
tggtgggtcatgacctgaagcacga

SEQ ID NO: 1703 - DNA, 25 bp, Artificial
  primer
acatgagcggctacacaatctacga

SEQ ID NO: 1704 - DNA, 25 bp, Artificial
  primer
catgagcggctacacaatctacgac

SEQ ID NO: 1705 - DNA, 25 bp, Artificial
  primer
aagctggaccactgcaggcgtgtct

SEQ ID NO: 1706 - DNA, 25 bp, Artificial
  primer
agagcatccagaacagcctgcttgg

SEQ ID NO: 1707 - DNA, 25 bp, Artificial
  primer
cccgcctggctgtgtcagactgaag

SEQ ID NO: 1708 - DNA, 25 bp, Artificial
  primer
ccgcctggctgtgtcagactgaagc

SEQ ID NO: 1709 - DNA, 25 bp, Artificial
  primer
ggctgtgtcagactgaagccccatc

SEQ ID NO: 1710 - DNA, 25 bp, Artificial
  primer
gaggctttcggctttttgggacagc

SEQ ID NO: 1711 - DNA, 25 bp, Artificial
  primer
ggctttttgggacagcaactacctt

SEQ ID NO: 1712 - DNA, 25 bp, Artificial
  primer
ggacagcaactaccttgcttttgga

SEQ ID NO: 1713 - DNA, 25 bp, Artificial
  primer
agagatctcctgggatcactctgag

SEQ ID NO: 1714 - DNA, 25 bp, Artificial
  primer
tcactgtcgtcttcctgaaagatga

SEQ ID NO: 1715 - DNA, 25 bp, Artificial
  primer
taccattctttgcctatcatcatta

SEQ ID NO: 1716 - DNA, 25 bp, Artificial
  primer
aaggcagcgttggtggacttctggt

SEQ ID NO: 1717 - DNA, 25 bp, Artificial
  primer
ggacttctggtgttgatcgtgattc

SEQ ID NO: 1718 - DNA, 25 bp, Artificial
  primer
tgatcgtgattctggtcatcctgtt

SEQ ID NO: 1719 - DNA, 25 bp, Artificial
  primer
gtcatcctgttcaagtgtggctttt

SEQ ID NO: 1720 - DNA, 25 bp, Artificial
  primer
ctgggagaggctatcagccagtcct

SEQ ID NO: 1721 - DNA, 25 bp, Artificial
  primer
ctttgcattactttttccttcagga

SEQ ID NO: 1722 - DNA, 25 bp, Artificial
  primer
tagtttttaaccatacattgtccca

SEQ ID NO: 1723 - DNA, 25 bp, Artificial
  primer
cattgtcccaaaagtgtctgtgcat

SEQ ID NO: 1724 - DNA, 25 bp, Artificial
  primer
gcccaggagcccatttggagggcct

SEQ ID NO: 1725 - DNA, 25 bp, Artificial
  primer
agactgtggagactgctcctgagcc

SEQ ID NO: 1726 - DNA, 25 bp, Artificial
  primer
catttccccagggcacgtggttgag

SEQ ID NO: 1727 - DNA, 25 bp, Artificial
  primer
gcacgtggttgagtggggggaacgc

SEQ ID NO: 1728 - DNA, 25 bp, Artificial
  primer
acttccctgggttagactgccagct

SEQ ID NO: 1729 - DNA, 25 bp, Artificial
  primer
gccagctgctgagccgcagagaagt

SEQ ID NO: 1730 - DNA, 25 bp, Artificial
  primer
gccgcagagaagtgacggttcctac

SEQ ID NO: 1731 - DNA, 25 bp, Artificial
  primer
gacggttcctacacaggacaggggt

SEQ ID NO: 1732 - DNA, 25 bp, Artificial
  primer
ttccttctgggcattacatcgcata

SEQ ID NO: 1733 - DNA, 25 bp, Artificial
  primer
gggcattacatcgcatagaaatcaa

SEQ ID NO: 1734 - DNA, 25 bp, Artificial
  primer
taatttgtggtgatttggatctgtg

SEQ ID NO: 1735 - DNA, 25 bp, Artificial
  primer
gatagcagggggattttccttccta

SEQ ID NO: 1736 - DNA, 25 bp, Artificial
  primer
gcaaagtaccggcccataggaatca

SEQ ID NO: 1737 - DNA, 25 bp, Artificial
  primer
cctttctcctcaggcctaagagagt

SEQ ID NO: 1738 - DNA, 25 bp, Artificial
  primer
agagaggagactgtcccagagacct

SEQ ID NO: 1739 - DNA, 25 bp, Artificial
  primer
tcctcgggtcagccagatagtctgg

SEQ ID NO: 1740 - DNA, 25 bp, Artificial
  primer
ggggtaaggccaggcctctagctac

SEQ ID NO: 1741 - DNA, 25 bp, Artificial
  primer
ggcctctagctacttggagttgtct

SEQ ID NO: 1742 - DNA, 25 bp, Artificial
  primer
tccctgtttcatatcacatgacaga

SEQ ID NO: 1743 - DNA, 25 bp, Artificial
  primer
gacagagaaacctgttctcatggca

SEQ ID NO: 1744 - DNA, 25 bp, Artificial
  primer
tctcatggcatgtaacatccctgtg

SEQ ID NO: 1745 - DNA, 25 bp, Artificial
  primer
catccctgtgaagagagcgttgtat

SEQ ID NO: 1746 - DNA, 25 bp, Artificial
  primer
ggaaggtacgataatcccacaccat

SEQ ID NO: 1747 - DNA, 25 bp, Artificial
  primer
tcccacaccatatcttggatttctt

SEQ ID NO: 1748 - DNA, 25 bp, Artificial
  primer
ttgactcaactctccattctaataa

SEQ ID NO: 1749 - DNA, 25 bp, Artificial
  primer
gagccacagtaacgaggagtccttc

SEQ ID NO: 1750 - DNA, 25 bp, Artificial
  primer
ctcagccctgatctactttctggga

SEQ ID NO: 1751 - DNA, 25 bp, Artificial
  primer
tttctgggaacctttctgctatcca

SEQ ID NO: 1752 - DNA, 25 bp, Artificial
  primer
gcagtatttccagtctgtctcagca

SEQ ID NO: 1753 - DNA, 25 bp, Artificial
  primer
tgcagatgcctctgaccaagaccag

SEQ ID NO: 1754 - DNA, 25 bp, Artificial
  primer
aagaccagcccacagtaactaataa

SEQ ID NO: 1755 - DNA, 25 bp, Artificial
  primer
gtaactaataacccggagccacgtg

SEQ ID NO: 1756 - DNA, 25 bp, Artificial
  primer
cacgtgggtgaactgtgcactccag

SEQ ID NO: 1757 - DNA, 25 bp, Artificial
  primer
tattttggtacctgtgcttgccaca

SEQ ID NO: 1758 - DNA, 25 bp, Artificial
  primer
ttgatagatttctctttgacttcca

SEQ ID NO: 1759 - DNA, 25 bp, Artificial
  primer
ttgacttccaagacctagcagttat

SEQ ID NO: 1760 - DNA, 25 bp, Artificial
  primer
gtcctagtgcttccgaatcatttaa

SEQ ID NO: 1761 - DNA, 25 bp, Artificial
  primer
aatggcattgtcggatatcttttac

SEQ ID NO: 1762 - DNA, 25 bp, Artificial
  primer
atcttttacatttcaattgcaatcc

SEQ ID NO: 1763 - DNA, 25 bp, Artificial
  primer
agtacttaactgtagtcttctccat

SEQ ID NO: 1764 - DNA, 25 bp, Artificial
  primer
gtagtcttctccatgaattacacgt

SEQ ID NO: 1765 - DNA, 25 bp, Artificial
  primer
gcctctagcttatagtttcatccct

SEQ ID NO: 1766 - DNA, 25 bp, Artificial
  primer
gcctgcgtgagtctgtacagggata

SEQ ID NO: 1767 - DNA, 25 bp, Artificial
  primer
ggtccaaactactctttgcactact

SEQ ID NO: 1768 - DNA, 25 bp, Artificial
  primer
atgtttctgggcctaccaaggttca

SEQ ID NO: 1769 - DNA, 25 bp, Artificial
  primer
ctgggaatgtgactgctggagcctg

SEQ ID NO: 1770 - DNA, 25 bp, Artificial
  primer
tgagagtgtgtgttggtggctgtgc

SEQ ID NO: 1771 - DNA, 25 bp, Artificial
  primer
acaagacgggagtcaccctgtgctt

SEQ ID NO: 1772 - DNA, 25 bp, Artificial
  primer
ccaagatactgacccattgaacccc

SEQ ID NO: 1773 - DNA, 25 bp, Artificial
  primer
ttctctccacaaagtccgtggtgcc

SEQ ID NO: 1774 - DNA, 25 bp, Artificial
  primer
ggtgggctgcagacactaatggtgt

SEQ ID NO: 1775 - DNA, 25 bp, Artificial
  primer
ggtcttggaacagcttctctatgtg

SEQ ID NO: 1776 - DNA, 25 bp, Artificial
  primer
gcttctctatgtgtggattcgtgta

SEQ ID NO: 1777 - DNA, 25 bp, Artificial
  primer
aaccacctgtaattttgtaccatat

SEQ ID NO: 1778 - DNA, 25 bp, Artificial
  primer
gtaccatatgtgtctttccatcaaa

SEQ ID NO: 1779 - DNA, 25 bp, Artificial
  primer
cagcagcagtggcctggaagacgcc

SEQ ID NO: 1780 - DNA, 25 bp, Artificial
  primer
gcagtggcctggaagacgccaccgc

SEQ ID NO: 1781 - DNA, 25 bp, Artificial
  primer
ttctcctgcgtctgtgtgcatagga

SEQ ID NO: 1782 - DNA, 25 bp, Artificial
  primer
cctgcgtctgtgtgcataggacatg

SEQ ID NO: 1783 - DNA, 25 bp, Artificial
  primer
gtctgtgtgcataggacatgatact

SEQ ID NO: 1784 - DNA, 25 bp, Artificial
  primer
gacatgatactaataaccacacggc

SEQ ID NO: 1785 - DNA, 25 bp, Artificial
  primer
aataaccacacggctggcgtgacct

SEQ ID NO: 1786 - DNA, 25 bp, Artificial
  primer
ccatgtgtaacttcctcacgttgtg

SEQ ID NO: 1787 - DNA, 25 bp, Artificial
  primer
tgtaacttcctcacgttgtgtgcga

SEQ ID NO: 1788 - DNA, 25 bp, Artificial
  primer
acttcctcacgttgtgtgcgataac

SEQ ID NO: 1789 - DNA, 25 bp, Artificial
  primer
gtgtgcgataacgtattttattgta

SEQ ID NO: 1790 - DNA, 25 bp, Artificial
  primer
ccgccttcaagtcccatgaatttac

SEQ ID NO: 1791 - DNA, 25 bp, Artificial
  primer
caaactgagtcatgttcaccgcatc

SEQ ID NO: 1792 - DNA, 25 bp, Artificial
  primer
catccccgtggtggtacagtcggtg

SEQ ID NO: 1793 - DNA, 25 bp, Artificial
  primer
tggtacagtcggtgcctgttgtcta

SEQ ID NO: 1794 - DNA, 25 bp, Artificial
  primer
gtctacacagctgtaaggtcacctg

SEQ ID NO: 1795 - DNA, 25 bp, Artificial
  primer
gaacaacactattgtcgtgccgctt

SEQ ID NO: 1796 - DNA, 25 bp, Artificial
  primer
gtcgtgccgcttttggaggatggga

SEQ ID NO: 1797 - DNA, 25 bp, Artificial
  primer
tggcaaagcacaaatggacccccga

SEQ ID NO: 1798 - DNA, 25 bp, Artificial
  primer
aggcctatctcccagacaaagtaaa

SEQ ID NO: 1799 - DNA, 25 bp, Artificial
  primer
aaatgtgaccttagatagcgttaat

SEQ ID NO: 1800 - DNA, 25 bp, Artificial
  primer
ccctttccatagccagagcagtaca

SEQ ID NO: 1801 - DNA, 25 bp, Artificial
  primer
agcctatccttaataaatcctccac

SEQ ID NO: 1802 - DNA, 25 bp, Artificial
  primer
aatcctccactctctggaaggagac

SEQ ID NO: 1803 - DNA, 25 bp, Artificial
  primer
gaaacttcgctaaccaactgttctt

SEQ ID NO: 1804 - DNA, 25 bp, Artificial
  primer
gttctttcttgagtgtatagcccca

SEQ ID NO: 1805 - DNA, 25 bp, Artificial
  primer
atagccccatcttgtggtaacttgc

SEQ ID NO: 1806 - DNA, 25 bp, Artificial
  primer
gcttctgcacttcatatccatattt

SEQ ID NO: 1807 - DNA, 25 bp, Artificial
  primer
atccatatttcctattgttcacttt

SEQ ID NO: 1808 - DNA, 25 bp, Artificial
  primer
tttattctgtagagcagcctgccaa

SEQ ID NO: 1809 - DNA, 25 bp, Artificial
  primer
aaagtccacataaccctagaattct

SEQ ID NO: 1810 - DNA, 25 bp, Artificial
  primer
gcctagagaccatgttgactttcct

SEQ ID NO: 1811 - DNA, 25 bp, Artificial
  primer
ggcaaggtcctgactttagtcttaa

SEQ ID NO: 1812 - DNA, 25 bp, Artificial
  primer
tctacaacctcacacaggacatgaa

SEQ ID NO: 1813 - DNA, 25 bp, Artificial
  primer
gaagtacctgtatagggcctgtaag

SEQ ID NO: 1814 - DNA, 25 bp, Artificial
  primer
gggcctgtaagtttgctgaatggtg

SEQ ID NO: 1815 - DNA, 25 bp, Artificial
  primer
ttctctctctttgaaggaatggctg

SEQ ID NO: 1816 - DNA, 25 bp, Artificial
  primer
caatatatttcctggctgacctgct

SEQ ID NO: 1817 - DNA, 25 bp, Artificial
  primer
cctgctagtccccacaaaagccagg

SEQ ID NO: 1818 - DNA, 25 bp, Artificial
  primer
agccaggttccctgcatttgaactc

SEQ ID NO: 1819 - DNA, 25 bp, Artificial
  primer
aaaggatagcatgccacctgcaact

SEQ ID NO: 1820 - DNA, 25 bp, Artificial
  primer
ctgcatgaccctttctgtatattca

SEQ ID NO: 1821 - DNA, 25 bp, Artificial
  primer
aacccaagctaagtgcttccgttgc

SEQ ID NO: 1822 - DNA, 25 bp, Artificial
  primer
gtgcttccgttgctttccaaggaaa

SEQ ID NO: 1823 - DNA, 25 bp, Artificial
  primer
atgtacagctgcagcattcctgaaa

SEQ ID NO: 1824 - DNA, 25 bp, Artificial
  primer
gtaactcatcctaagtgggcacatt

SEQ ID NO: 1825 - DNA, 25 bp, Artificial
  primer
tgggcacatttagacatagcaggcg

SEQ ID NO: 1826 - DNA, 25 bp, Artificial
  primer
gcaggcgtgatgaccaacaaagatg

SEQ ID NO: 1827 - DNA, 25 bp, Artificial
  primer
gaagttccctatctacggaaaggca

SEQ ID NO: 1828 - DNA, 25 bp, Artificial
  primer
gaaaggcatgactgggaggcccaca

SEQ ID NO: 1829 - DNA, 25 bp, Artificial
  primer
ggcccacaaggactctcattgagtt

SEQ ID NO: 1830 - DNA, 25 bp, Artificial
  primer
gagttcttacttcgtttcagtcaag

SEQ ID NO: 1831 - DNA, 25 bp, Artificial
  primer
gacaatgcttagttcagatactcaa

SEQ ID NO: 1832 - DNA, 25 bp, Artificial
  primer
agaacttcctaatcacttttcagag

SEQ ID NO: 1833 - DNA, 25 bp, Artificial
  primer
gaaaattactatgcacttgtcagaa

SEQ ID NO: 1834 - DNA, 25 bp, Artificial
  primer
gaaactacaactctcacgtgtgctc

SEQ ID NO: 1835 - DNA, 25 bp, Artificial
  primer
taggtgctaacggccatgagctccg

SEQ ID NO: 1836 - DNA, 25 bp, Artificial
  primer
gctccgactctccaaagtgagctcc

SEQ ID NO: 1837 - DNA, 25 bp, Artificial
  primer
ccacgctgcctcaggtatcatgggc

SEQ ID NO: 1838 - DNA, 25 bp, Artificial
  primer
tgggcgtaatgatcacccaggctcc

SEQ ID NO: 1839 - DNA, 25 bp, Artificial
  primer
caggctccgggagatctcatggatg

SEQ ID NO: 1840 - DNA, 25 bp, Artificial
  primer
gaatttttggctctggtgttttcgc

SEQ ID NO: 1841 - DNA, 25 bp, Artificial
  primer
actggaagctttgattcaccctcca

SEQ ID NO: 1842 - DNA, 25 bp, Artificial
  primer
tagtagaatggcttttcaccctggt

SEQ ID NO: 1843 - DNA, 25 bp, Artificial
  primer
gaaactcttgaatactgcctgcatc

SEQ ID NO: 1844 - DNA, 25 bp, Artificial
  primer
caccatggccaggttgcctaggagt

SEQ ID NO: 1845 - DNA, 25 bp, Artificial
  primer
atccagctgacccatgtgcagacat

SEQ ID NO: 1846 - DNA, 25 bp, Artificial
  primer
atgtgcagacataggcggcttcctg

SEQ ID NO: 1847 - DNA, 25 bp, Artificial
  primer
ggatctgggctttaatgcagaggcc

SEQ ID NO: 1848 - DNA, 25 bp, Artificial
  primer
tttaatgcagaggccatgtccttgt

SEQ ID NO: 1849 - DNA, 25 bp, Artificial
  primer
gccaccctggaacggagaaggcagc

SEQ ID NO: 1850 - DNA, 25 bp, Artificial
  primer
aggcagctgacggggattgccttcc

SEQ ID NO: 1851 - DNA, 25 bp, Artificial
  primer
cccaggaggcaggcacagccaggga

SEQ ID NO: 1852 - DNA, 25 bp, Artificial
  primer
ggagaggggaggagtgggcagtgaa

SEQ ID NO: 1853 - DNA, 25 bp, Artificial
  primer
cccctcctggaaagcaggcctgatg

SEQ ID NO: 1854 - DNA, 25 bp, Artificial
  primer
tggaaagcaggcctgatggcttccc

SEQ ID NO: 1855 - DNA, 25 bp, Artificial
  primer
ccacctgaccagagtgttctcttca

SEQ ID NO: 1856 - DNA, 25 bp, Artificial
  primer
tacagatcagcgcgcacatggggtc

SEQ ID NO: 1857 - DNA, 25 bp, Artificial
  primer
tgtctctggggcgagtcttggagcc

SEQ ID NO: 1858 - DNA, 25 bp, Artificial
  primer
ctgttggtgctgatttggacccgtt

SEQ ID NO: 1859 - DNA, 25 bp, Artificial
  primer
gagctgctctgttgtggcaaaaccc

SEQ ID NO: 1860 - DNA, 25 bp, Artificial
  primer
aagtgctgtgatgtgtggctgtgac

SEQ ID NO: 1861 - DNA, 25 bp, Artificial
  primer
ggctgtgacaagcctggagcgggtc

SEQ ID NO: 1862 - DNA, 25 bp, Artificial
  primer
cactgaacgcctgctgaatgtgccg

SEQ ID NO: 1863 - DNA, 25 bp, Artificial
  primer
ctgaatgtgccgctgactcagctgt

SEQ ID NO: 1864 - DNA, 25 bp, Artificial
  primer
gaagcaggcaggcctctcagaaggg

SEQ ID NO: 1865 - DNA, 25 bp, Artificial
  primer
gaggcctccaaatctattgagtccc

SEQ ID NO: 1866 - DNA, 25 bp, Artificial
  primer
ttgagtccccacagtttgctcaagc

SEQ ID NO: 1867 - DNA, 25 bp, Artificial
  primer
tggggaggtgaacctgtcttcatcg

SEQ ID NO: 1868 - DNA, 25 bp, Artificial
  primer
tctccctaccactacacgaaggtga

SEQ ID NO: 1869 - DNA, 25 bp, Artificial
  primer
gtgacctacagccaggaggacgtgg

SEQ ID NO: 1870 - DNA, 25 bp, Artificial
  primer
ctgctgcacctgacacattacaatg

SEQ ID NO: 1871 - DNA, 25 bp, Artificial
  primer
gcgccaggcagtgcagcggaggcgg

SEQ ID NO: 1872 - DNA, 25 bp, Artificial
  primer
tccctggctgctgagttgcaggtgg

SEQ ID NO: 1873 - DNA, 25 bp, Artificial
  primer
ggaactgtcatcacgcagtgcttca

SEQ ID NO: 1874 - DNA, 25 bp, Artificial
  primer
gcttcagagcctcgggctcaggtgg

SEQ ID NO: 1875 - DNA, 25 bp, Artificial
  primer
tcccagggtccaggctgagggctgg

SEQ ID NO: 1876 - DNA, 25 bp, Artificial
  primer
ggaggccaagcccatttgtgtaatc

SEQ ID NO: 1877 - DNA, 25 bp, Artificial
  primer
ccttctgcgctaccttgagtagttg

SEQ ID NO: 1878 - DNA, 25 bp, Artificial
  primer
ggatatgtgatggcgtccagtttgg

SEQ ID NO: 1879 - DNA, 25 bp, Artificial
  primer
gatggcgtccagtttggagctggga

SEQ ID NO: 1880 - DNA, 25 bp, Artificial
  primer
ggcgtccagtttggagctgggataa

SEQ ID NO: 1881 - DNA, 25 bp, Artificial
  primer
gagctgggataaggttcctgtagcc

SEQ ID NO: 1882 - DNA, 25 bp, Artificial
  primer
acaccgtctctcgaggaaacgcggt

SEQ ID NO: 1883 - DNA, 25 bp, Artificial
  primer
gtctctcgaggaaacgcggttcagc

SEQ ID NO: 1884 - DNA, 25 bp, Artificial
  primer
gaggaaacgcggttcagcgattctt

SEQ ID NO: 1885 - DNA, 25 bp, Artificial
  primer
gaaacgcggttcagcgattctttga

SEQ ID NO: 1886 - DNA, 25 bp, Artificial
  primer
cgcggttcagcgattctttgactgc

SEQ ID NO: 1887 - DNA, 25 bp, Artificial
  primer
ggttcagcgattctttgactgcgga

SEQ ID NO: 1888 - DNA, 25 bp, Artificial
  primer
ttcagcgattctttgactgcggacc

SEQ ID NO: 1889 - DNA, 25 bp, Artificial
  primer
gacagacaggaaaacacccaccagc

SEQ ID NO: 1890 - DNA, 25 bp, Artificial
  primer
ctccctggggcaccggttggagagg

SEQ ID NO: 1891 - DNA, 25 bp, Artificial
  primer
gaggcggacagtggtcacggacctc

SEQ ID NO: 1892 - DNA, 25 bp, Artificial
  primer
ggcccagaaccctgcagatgaagcc

SEQ ID NO: 1893 - DNA, 25 bp, Artificial
  primer
gacccatcaggggcgaggagggcac

SEQ ID NO: 1894 - DNA, 25 bp, Artificial
  primer
ggagggcacggaaacctgtgccgag

SEQ ID NO: 1895 - DNA, 25 bp, Artificial
  primer
gtgccgagatgggggcaagaggccc

SEQ ID NO: 1896 - DNA, 25 bp, Artificial
  primer
gaggagatccccagagtcagggagg

SEQ ID NO: 1897 - DNA, 25 bp, Artificial
  primer
gcctgtccttgggagagggcgtcac

SEQ ID NO: 1898 - DNA, 25 bp, Artificial
  primer
tcacccggtcagagactccaaataa

SEQ ID NO: 1899 - DNA, 25 bp, Artificial
  primer
gagactccaaataaaccggttcttg

SEQ ID NO: 1900 - DNA, 25 bp, Artificial
  primer
ggtttcattcgctcaaattatccct

SEQ ID NO: 1901 - DNA, 25 bp, Artificial
  primer
gatactcaatcactttggtcccatg

SEQ ID NO: 1902 - DNA, 25 bp, Artificial
  primer
agaaagacgccgatcctcagatgaa

SEQ ID NO: 1903 - DNA, 25 bp, Artificial
  primer
ctcagatgaacccgaatggcccagc

SEQ ID NO: 1904 - DNA, 25 bp, Artificial
  primer
ggtggatgttagcagttcttccctt

SEQ ID NO: 1905 - DNA, 25 bp, Artificial
  primer
gttcttcccttggaaagccgagctc

SEQ ID NO: 1906 - DNA, 25 bp, Artificial
  primer
tccccttcctagcaatgaggtcctt

SEQ ID NO: 1907 - DNA, 25 bp, Artificial
  primer
aatggtattcgacgagtcctggcct

SEQ ID NO: 1908 - DNA, 25 bp, Artificial
  primer
tggccttcatatcccgaaaccaaaa

SEQ ID NO: 1909 - DNA, 25 bp, Artificial
  primer
gtggattgccgaagaggagctccca

SEQ ID NO: 1910 - DNA, 25 bp, Artificial
  primer
gaggcatcagcctgctgttgatcac

SEQ ID NO: 1911 - DNA, 25 bp, Artificial
  primer
tggcccccatttacagcaggagtta

SEQ ID NO: 1912 - DNA, 25 bp, Artificial
  primer
ggagttaccttgttttctggacagt

SEQ ID NO: 1913 - DNA, 25 bp, Artificial
  primer
ccttcctcatcatggttgtggtgta

SEQ ID NO: 1914 - DNA, 25 bp, Artificial
  primer
gtacctgcggatctacgtgtacgtc

SEQ ID NO: 1915 - DNA, 25 bp, Artificial
  primer
gaggaaaaccaacgtcttgtctccg

SEQ ID NO: 1916 - DNA, 25 bp, Artificial
  primer
tctccgcatacaagtgggtccatca

SEQ ID NO: 1917 - DNA, 25 bp, Artificial
  primer
gccggaggacacccatgaagctaat

SEQ ID NO: 1918 - DNA, 25 bp, Artificial
  primer
gggcgtttgtggtatgctggacccc

SEQ ID NO: 1919 - DNA, 25 bp, Artificial
  primer
gagaacccagagaggcgtccctctc

SEQ ID NO: 1920 - DNA, 25 bp, Artificial
  primer
caggagtgacacaggcagccagtac

SEQ ID NO: 1921 - DNA, 25 bp, Artificial
  primer
gcacttcctaaactctggatgcctc

SEQ ID NO: 1922 - DNA, 25 bp, Artificial
  primer
ctggctggaccaggatgcagtcaca

SEQ ID NO: 1923 - DNA, 25 bp, Artificial
  primer
ggctacctgccatgtggttagcgac

SEQ ID NO: 1924 - DNA, 25 bp, Artificial
  primer
tggttagcgactcatggactcatcc

SEQ ID NO: 1925 - DNA, 25 bp, Artificial
  primer
tcccaggccttcgcagattatgtta

SEQ ID NO: 1926 - DNA, 25 bp, Artificial
  primer
cggtaccatcagcttgcaggggctg

SEQ ID NO: 1927 - DNA, 25 bp, Artificial
  primer
tgcaggggctgaagcatgggctgcc

SEQ ID NO: 1928 - DNA, 25 bp, Artificial
  primer
gaggcccagcaaacaggcattctca

SEQ ID NO: 1929 - DNA, 25 bp, Artificial
  primer
ggcattctcacagctgggtttatag

SEQ ID NO: 1930 - DNA, 25 bp, Artificial
  primer
ctcagtatcctgggaaccctgggcc

SEQ ID NO: 1931 - DNA, 25 bp, Artificial
  primer
ataattgctgaagagatcccctccc

SEQ ID NO: 1932 - DNA, 25 bp, Artificial
  primer
tcaaaccctttcatacctttattct

SEQ ID NO: 1933 - DNA, 25 bp, Artificial
  primer
tatgtattcgttgttctgtttttcc

SEQ ID NO: 1934 - DNA, 25 bp, Artificial
  primer
gatgattctgtcgtaaagtgatgct

SEQ ID NO: 1935 - DNA, 25 bp, Artificial
  primer
aagtgatgctatgttgtcgttacaa

SEQ ID NO: 1936 - DNA, 25 bp, Artificial
  primer
gtgctgttacgtggcactgtacagt

SEQ ID NO: 1937 - DNA, 25 bp, Artificial
  primer
cagtcatgtgccacgtaacagcgtc

SEQ ID NO: 1938 - DNA, 25 bp, Artificial
  primer
cacgtaacagcgtctgggtcagtga

SEQ ID NO: 1939 - DNA, 25 bp, Artificial
  primer
gggtcagtgacggacacttacctga

SEQ ID NO: 1940 - DNA, 25 bp, Artificial
  primer
acttacctgacagcggatccacaat

SEQ ID NO: 1941 - DNA, 25 bp, Artificial
  primer
gatccacaatattctcgtgcagtgt

SEQ ID NO: 1942 - DNA, 25 bp, Artificial
  primer
gcagtgtgtttggaatcctggtctg

SEQ ID NO: 1943 - DNA, 25 bp, Artificial
  primer
gtgagtgatgttcagtcatgctgct

SEQ ID NO: 1944 - DNA, 25 bp, Artificial
  primer
cattctgatgtctggagcttaggaa

SEQ ID NO: 1945 - DNA, 25 bp, Artificial
  primer
ctccagcttctgcagtgcattgttg

SEQ ID NO: 1946 - DNA, 25 bp, Artificial
  primer
ttgttgatgaggattcgcccgtcct

SEQ ID NO: 1947 - DNA, 25 bp, Artificial
  primer
cccgtccttccagttggagagttct

SEQ ID NO: 1948 - DNA, 25 bp, Artificial
  primer
ggagagttctcggagccatttgtac

SEQ ID NO: 1949 - DNA, 25 bp, Artificial
  primer
ggagccatttgtacatttcatcact

SEQ ID NO: 1950 - DNA, 25 bp, Artificial
  primer
acatttcatcactcagtgtatgcga

SEQ ID NO: 1951 - DNA, 25 bp, Artificial
  primer
gccaaaagaaaggccagcacctgaa

SEQ ID NO: 1952 - DNA, 25 bp, Artificial
  primer
gcacctgaagaattgatgggccacc

SEQ ID NO: 1953 - DNA, 25 bp, Artificial
  primer
aagaattgatgggccacccgttcat

SEQ ID NO: 1954 - DNA, 25 bp, Artificial
  primer
atgatggaaatgccgccgtggtgtc

SEQ ID NO: 1955 - DNA, 25 bp, Artificial
  primer
gcatgctcattgtgtgaaggctagc

SEQ ID NO: 1956 - DNA, 25 bp, Artificial
  primer
ggaggtatcaaactagctgctatgt

SEQ ID NO: 1957 - DNA, 25 bp, Artificial
  primer
ctgctatgtgcaaacagcgtccatt

SEQ ID NO: 1958 - DNA, 25 bp, Artificial
  primer
acagcgtccattttttcatattaga

SEQ ID NO: 1959 - DNA, 25 bp, Artificial
  primer
ggtggaacctcaagaatgactttat

SEQ ID NO: 1960 - DNA, 25 bp, Artificial
  primer
atgactttattcttgtatctcatct

SEQ ID NO: 1961 - DNA, 25 bp, Artificial
  primer
gggatagttccgtgtaagggctttg

SEQ ID NO: 1962 - DNA, 25 bp, Artificial
  primer
ggctttgatgccagcatccttggat

SEQ ID NO: 1963 - DNA, 25 bp, Artificial
  primer
agcatccttggatcagtactgaact

SEQ ID NO: 1964 - DNA, 25 bp, Artificial
  primer
tgaactcagttccatccgtaaaata

SEQ ID NO: 1965 - DNA, 25 bp, Artificial
  primer
ggtaagtggcagctgctctatttaa

SEQ ID NO: 1966 - DNA, 25 bp, Artificial
  primer
ttcttttctaaccaagaggctggtt

SEQ ID NO: 1967 - DNA, 25 bp, Artificial
  primer
ttggcatctctgtcccattccctgg

SEQ ID NO: 1968 - DNA, 25 bp, Artificial
  primer
agatggaattccttcaggccggcac

SEQ ID NO: 1969 - DNA, 25 bp, Artificial
  primer
tccaagggagcctcatgcagatagt

SEQ ID NO: 1970 - DNA, 25 bp, Artificial
  primer
aagggagcctcatgcagatagtagg

SEQ ID NO: 1971 - DNA, 25 bp, Artificial
  primer
gagcctcatgcagatagtaggaaat

SEQ ID NO: 1972 - DNA, 25 bp, Artificial
  primer
cctcatgcagatagtaggaaatcag

SEQ ID NO: 1973 - DNA, 25 bp, Artificial
  primer
gagactaaggctatctgcttccctt

SEQ ID NO: 1974 - DNA, 25 bp, Artificial
  primer
actaaggctatctgcttcccttatg

SEQ ID NO: 1975 - DNA, 25 bp, Artificial
  primer
aaggctatctgcttcccttatgccc

SEQ ID NO: 1976 - DNA, 25 bp, Artificial
  primer
tctgcttcccttatgccctgactgg

SEQ ID NO: 1977 - DNA, 25 bp, Artificial
  primer
agggcatcccagctaggccttggga

SEQ ID NO: 1978 - DNA, 25 bp, Artificial
  primer
gagaaatcccgggaactgtattgac

SEQ ID NO: 1979 - DNA, 25 bp, Artificial
  primer
aatcccgggaactgtattgacacaa

SEQ ID NO: 1980 - DNA, 25 bp, Artificial
  primer
attgacacaaagattcttattgcac

SEQ ID NO: 1981 - DNA, 25 bp, Artificial
  primer
acacaaagattcttattgcacttgt

SEQ ID NO: 1982 - DNA, 25 bp, Artificial
  primer
gtaacttctccacagaagtgccaat

SEQ ID NO: 1983 - DNA, 25 bp, Artificial
  primer
aaacagtattgcaatgacaccatta

SEQ ID NO: 1984 - DNA, 25 bp, Artificial
  primer
tgttagaggagtgctcttccaaaca

SEQ ID NO: 1985 - DNA, 25 bp, Artificial
  primer
aggtttagtcagagctttcacaagt

SEQ ID NO: 1986 - DNA, 25 bp, Artificial
  primer
gagtaaccctttctgtattgagtgc

SEQ ID NO: 1987 - DNA, 25 bp, Artificial
  primer
gttttgttacactaatgcgcaccac

SEQ ID NO: 1988 - DNA, 25 bp, Artificial
  primer
cactaatgcgcaccacatatttatg

SEQ ID NO: 1989 - DNA, 25 bp, Artificial
  primer
ggttttcgtcttagttgtagcacac

SEQ ID NO: 1990 - DNA, 25 bp, Artificial
  primer
gtagcacacttaccctaattttgcc

SEQ ID NO: 1991 - DNA, 25 bp, Artificial
  primer
gactggtggcaagtacacagccctt

SEQ ID NO: 1992 - DNA, 25 bp, Artificial
  primer
cccttttttttgcagtgctaacttg

SEQ ID NO: 1993 - DNA, 25 bp, Artificial
  primer
acacacacatgcaattttgcttaac

SEQ ID NO: 1994 - DNA, 25 bp, Artificial
  primer
gaaggggtgtgtatgtctagctgtg

SEQ ID NO: 1995 - DNA, 25 bp, Artificial
  primer
atgtctagctgtgtctaccatgtgt

SEQ ID NO: 1996 - DNA, 25 bp, Artificial
  primer
gtctaccatgtgtatgtattcttga

SEQ ID NO: 1997 - DNA, 25 bp, Artificial
  primer
aatcttcatatatattatcatccct

SEQ ID NO: 1998 - DNA, 25 bp, Artificial
  primer
atattatcatccctaatgtagcagg

SEQ ID NO: 1999 - DNA, 25 bp, Artificial
  primer
gggaagtatttaattgcccatgata

SEQ ID NO: 2000 - DNA, 25 bp, Artificial
  primer
attttacttatactatgccagagag

SEQ ID NO: 2001 - DNA, 25 bp, Artificial
  primer
ttacacatgtaatcttgggtttttc

SEQ ID NO: 2002 - DNA, 25 bp, Artificial
  primer
gtttttcacatatgtaggtattcat

SEQ ID NO: 2003 - DNA, 25 bp, Artificial
  primer
gaattcctgatgggatagtatcaat

SEQ ID NO: 2004 - DNA, 25 bp, Artificial
  primer
tgccttctgctcagctgatgatgga

SEQ ID NO: 2005 - DNA, 25 bp, Artificial
  primer
gttgcaggaatccagcaggctcacg

SEQ ID NO: 2006 - DNA, 25 bp, Artificial
  primer
ggctcacgcggaacagttggccaac

SEQ ID NO: 2007 - DNA, 25 bp, Artificial
  primer
ggccaacatgagaatccaggatctg

SEQ ID NO: 2008 - DNA, 25 bp, Artificial
  primer
acaaccccattctgcggaagaggaa

SEQ ID NO: 2009 - DNA, 25 bp, Artificial
  primer
agaggaagttacttggcaccaagcc

SEQ ID NO: 2010 - DNA, 25 bp, Artificial
  primer
gacagtgtctatatccacgaccatg

SEQ ID NO: 2011 - DNA, 25 bp, Artificial
  primer
ggagccgaggattccaatgttgcct

SEQ ID NO: 2012 - DNA, 25 bp, Artificial
  primer
atgtgattgctcagtgtattctccc

SEQ ID NO: 2013 - DNA, 25 bp, Artificial
  primer
cccacgaatcccaataatgacagct

SEQ ID NO: 2014 - DNA, 25 bp, Artificial
  primer
atgacagcttcagactttgtttttt

SEQ ID NO: 2015 - DNA, 25 bp, Artificial
  primer
cctgtttcctcctcaatagaattgc

SEQ ID NO: 2016 - DNA, 25 bp, Artificial
  primer
gttcttctggacagaccacaactct

SEQ ID NO: 2017 - DNA, 25 bp, Artificial
  primer
gaagctagtgctgctatctcatata

SEQ ID NO: 2018 - DNA, 25 bp, Artificial
  primer
gatagttaactacctgagaccagct

SEQ ID NO: 2019 - DNA, 25 bp, Artificial
  primer
aggaatattgtcttatctccataac

SEQ ID NO: 2020 - DNA, 25 bp, Artificial
  primer
caagggcaggttcgattctagctct

SEQ ID NO: 2021 - DNA, 25 bp, Artificial
  primer
ttctagctctaattactgtcatgtc

SEQ ID NO: 2022 - DNA, 25 bp, Artificial
  primer
tactgtcatgtcatttacccactgg

SEQ ID NO: 2023 - DNA, 25 bp, Artificial
  primer
ggtatgtttcacttcttgacaatat

SEQ ID NO: 2024 - DNA, 25 bp, Artificial
  primer
aaccgatacctgtcctgcaggtcta

SEQ ID NO: 2025 - DNA, 25 bp, Artificial
  primer
caagcacaagtactggggacacatc

SEQ ID NO: 2026 - DNA, 25 bp, Artificial
  primer
catcgcggaagccctcagcaagatg

SEQ ID NO: 2027 - DNA, 25 bp, Artificial
  primer
gctcttccaagtgtccacgttggat

SEQ ID NO: 2028 - DNA, 25 bp, Artificial
  primer
ttgtccggtaccctgtcaggggtgg

SEQ ID NO: 2029 - DNA, 25 bp, Artificial
  primer
tgtcaggggtggagggcttcaccag

SEQ ID NO: 2030 - DNA, 25 bp, Artificial
  primer
gaggaccaggagatgctgagccgca

SEQ ID NO: 2031 - DNA, 25 bp, Artificial
  primer
atgctgagccgcatcgagaagcagc

SEQ ID NO: 2032 - DNA, 25 bp, Artificial
  primer
catcgagaagcagctcaagcgccgc

SEQ ID NO: 2033 - DNA, 25 bp, Artificial
  primer
tcccaggtgtctgagcacagcatca

SEQ ID NO: 2034 - DNA, 25 bp, Artificial
  primer
gcacagcatcatcaaggacttcacc

SEQ ID NO: 2035 - DNA, 25 bp, Artificial
  primer
ggacttcaccaagcagaaatacccg

SEQ ID NO: 2036 - DNA, 25 bp, Artificial
  primer
cgcccgctctagcgggttctgggaa

SEQ ID NO: 2037 - DNA, 25 bp, Artificial
  primer
cggcgagatccagcatcgcatgcag

SEQ ID NO: 2038 - DNA, 25 bp, Artificial
  primer
gcgagatccagcatcgcatgcagcg

SEQ ID NO: 2039 - DNA, 25 bp, Artificial
  primer
ccagcatcgcatgcagcgcaaggtt

SEQ ID NO: 2040 - DNA, 25 bp, Artificial
  primer
gcatcgcatgcagcgcaaggttctc

SEQ ID NO: 2041 - DNA, 25 bp, Artificial
  primer
tcgcatgcagcgcaaggttctctac

SEQ ID NO: 2042 - DNA, 25 bp, Artificial
  primer
ctgcctgccattgacaatgttgctg

SEQ ID NO: 2043 - DNA, 25 bp, Artificial
  primer
ttgacaatgttgctgggacctctgc

SEQ ID NO: 2044 - DNA, 25 bp, Artificial
  primer
gaggaaggagctgtagtgtcctgct

SEQ ID NO: 2045 - DNA, 25 bp, Artificial
  primer
gaaggagctgtagtgtcctgctgcc

SEQ ID NO: 2046 - DNA, 25 bp, Artificial
  primer
gttctgggaagtgtgcttttggcat

SEQ ID NO: 2047 - DNA, 25 bp, Artificial
  primer
ctgggaagtgtgcttttggcatccg

SEQ ID NO: 2048 - DNA, 25 bp, Artificial
  primer
gggtccggcctggaagatatcccgg

SEQ ID NO: 2049 - DNA, 25 bp, Artificial
  primer
gaacaacggtgatttcttcattgcc

SEQ ID NO: 2050 - DNA, 25 bp, Artificial
  primer
tgccaatgagggtcgacggcccatc

SEQ ID NO: 2051 - DNA, 25 bp, Artificial
  primer
gacggcccatctacatcgatggacg

SEQ ID NO: 2052 - DNA, 25 bp, Artificial
  primer
cgcctcagcaacaactctgtggtgg

SEQ ID NO: 2053 - DNA, 25 bp, Artificial
  primer
tcgtcttccttatcaaccaggacct

SEQ ID NO: 2054 - DNA, 25 bp, Artificial
  primer
aggagtggtggcaggactcgtgggc

SEQ ID NO: 2055 - DNA, 25 bp, Artificial
  primer
tgagctgggaactcaggctcctgga

SEQ ID NO: 2056 - DNA, 25 bp, Artificial
  primer
gctgcgggccattgatttgagcctt

SEQ ID NO: 2057 - DNA, 25 bp, Artificial
  primer
gagggaggatagggctggcctttgt

SEQ ID NO: 2058 - DNA, 25 bp, Artificial
  primer
gtctccagctgattagcctcagact

SEQ ID NO: 2059 - DNA, 25 bp, Artificial
  primer
cgctttgagctgcgcgaggacgggc

SEQ ID NO: 2060 - DNA, 25 bp, Artificial
  primer
gcaccagcgacttcgtaattcacgg

SEQ ID NO: 2061 - DNA, 25 bp, Artificial
  primer
cagcgacttcgtaattcacgggatc

SEQ ID NO: 2062 - DNA, 25 bp, Artificial
  primer
tcacgggatcatccatggggtcacc

SEQ ID NO: 2063 - DNA, 25 bp, Artificial
  primer
tcacccatgacgtggagctgcagga

SEQ ID NO: 2064 - DNA, 25 bp, Artificial
  primer
gctgcaggagtctgtcatcactgtg

SEQ ID NO: 2065 - DNA, 25 bp, Artificial
  primer
tcatgggctggagccgctttgggga

SEQ ID NO: 2066 - DNA, 25 bp, Artificial
  primer
gctgcactgaggggctgggtgctgg

SEQ ID NO: 2067 - DNA, 25 bp, Artificial
  primer
tgctggggaggggctggtaggaggg

SEQ ID NO: 2068 - DNA, 25 bp, Artificial
  primer
tggtaggagggagggtgggcccact

SEQ ID NO: 2069 - DNA, 25 bp, Artificial
  primer
ggcccactgctttggaggtgatggg

SEQ ID NO: 2070 - DNA, 25 bp, Artificial
  primer
ctgttatctgtggtgagcaggttgg

SEQ ID NO: 2071 - DNA, 25 bp, Artificial
  primer
atctgtggtgagcaggttggtgtca

SEQ ID NO: 2072 - DNA, 25 bp, Artificial
  primer
gtggtgagcaggttggtgtcaaagg

SEQ ID NO: 2073 - DNA, 25 bp, Artificial
  primer
gatcgtagctgaggtatgtgcttcc

SEQ ID NO: 2074 - DNA, 25 bp, Artificial
  primer
tagctgaggtatgtgcttcccaggc

SEQ ID NO: 2075 - DNA, 25 bp, Artificial
  primer
cctccaaagcttccacatttttgtt

SEQ ID NO: 2076 - DNA, 25 bp, Artificial
  primer
gggtgtattctcatcccagattttt

SEQ ID NO: 2077 - DNA, 25 bp, Artificial
  primer
gatttttctcatttagatcataaac

SEQ ID NO: 2078 - DNA, 25 bp, Artificial
  primer
gaaagggctagaattgcaatcttgt

SEQ ID NO: 2079 - DNA, 25 bp, Artificial
  primer
ggctagaattgcaatcttgtgtaac

SEQ ID NO: 2080 - DNA, 25 bp, Artificial
  primer
gaattgcaatcttgtgtaacttaaa

SEQ ID NO: 2081 - DNA, 25 bp, Artificial
  primer
tcaccccagcgtgttctgtgaactt

SEQ ID NO: 2082 - DNA, 25 bp, Artificial
  primer
tgacaacgcgtgcttgcagggtgct

SEQ ID NO: 2083 - DNA, 25 bp, Artificial
  primer
agggtgctttttggatgactgggga

SEQ ID NO: 2084 - DNA, 25 bp, Artificial
  primer
gaacctcagaactgtgatcctccaa

SEQ ID NO: 2085 - DNA, 25 bp, Artificial
  primer
tcctccaaggagcgcgctacttgaa

SEQ ID NO: 2086 - DNA, 25 bp, Artificial
  primer
gtcgaatggcttctcagggattttg

SEQ ID NO: 2087 - DNA, 25 bp, Artificial
  primer
gggattttgttttccgtgcacatat

SEQ ID NO: 2088 - DNA, 25 bp, Artificial
  primer
agagcactcagatttcagttctgtt

SEQ ID NO: 2089 - DNA, 25 bp, Artificial
  primer
gagggatcgactgacgttcattgct

SEQ ID NO: 2090 - DNA, 25 bp, Artificial
  primer
gacgttcattgctgttccataacta

SEQ ID NO: 2091 - DNA, 25 bp, Artificial
  primer
gaagcttctagcgttagttcacact

SEQ ID NO: 2092 - DNA, 25 bp, Artificial
  primer
ctatcccaagccaatcacagtctgg

SEQ ID NO: 2093 - DNA, 25 bp, Artificial
  primer
tcctcagggagcatttgtacacaaa

SEQ ID NO: 2094 - DNA, 25 bp, Artificial
  primer
gacacagcccaccagatgatgtaga

SEQ ID NO: 2095 - DNA, 25 bp, Artificial
  primer
aactggacaacacagccagcactgt

SEQ ID NO: 2096 - DNA, 25 bp, Artificial
  primer
agccatagctattgtcattccctgc

SEQ ID NO: 2097 - DNA, 25 bp, Artificial
  primer
atgcctccttgtattggtttacact

SEQ ID NO: 2098 - DNA, 25 bp, Artificial
  primer
tactgtactgtaaacgctctatgca

SEQ ID NO: 2099 - DNA, 25 bp, Artificial
  primer
gagtgggtgtgatgtagggtttttt

SEQ ID NO: 2100 - DNA, 25 bp, Artificial
  primer
gctgttatgctgtttcctagctagg

SEQ ID NO: 2101 - DNA, 25 bp, Artificial
  primer
tagctaggagcaggcttgtggcagc

SEQ ID NO: 2102 - DNA, 25 bp, Artificial
  primer
ttgtggcagcctgattcggggctga

SEQ ID NO: 2103 - DNA, 25 bp, Artificial
  primer
gaaaatcgatgcagccatttctgat

SEQ ID NO: 2104 - DNA, 25 bp, Artificial
  primer
tttatttctttactggatcttcaca

SEQ ID NO: 2105 - DNA, 25 bp, Artificial
  primer
gatcttcacagttggagtttgaccc

SEQ ID NO: 2106 - DNA, 25 bp, Artificial
  primer
taattcttcacctaagtctctgtga

SEQ ID NO: 2107 - DNA, 25 bp, Artificial
  primer
attgaaatgttcgttttctcctgcc

SEQ ID NO: 2108 - DNA, 25 bp, Artificial
  primer
gtgactcgagtcacactcaagggaa

SEQ ID NO: 2109 - DNA, 25 bp, Artificial
  primer
tgagcgtgaatctgtatcttgccgg

SEQ ID NO: 2110 - DNA, 25 bp, Artificial
  primer
gtatcttgccggtcatttttatgtt

SEQ ID NO: 2111 - DNA, 25 bp, Artificial
  primer
caaatgggctgctgcttagcttgca

SEQ ID NO: 2112 - DNA, 25 bp, Artificial
  primer
ttagcttgcaccttgtcacatagag

SEQ ID NO: 2113 - DNA, 25 bp, Artificial
  primer
ggggaagcactcgtgtgcaacagac

SEQ ID NO: 2114 - DNA, 25 bp, Artificial
  primer
gtcccctaagcacaactatttacat

SEQ ID NO: 2115 - DNA, 25 bp, Artificial
  primer
tacatttctttatagcctcttctga

SEQ ID NO: 2116 - DNA, 25 bp, Artificial
  primer
ttatagcctcttctgatctctaaca

SEQ ID NO: 2117 - DNA, 25 bp, Artificial
  primer
gtaactgatcttttgtctaaggatt

SEQ ID NO: 2118 - DNA, 25 bp, Artificial
  primer
gaacttatgcactgctactgtagta

SEQ ID NO: 2119 - DNA, 25 bp, Artificial
  primer
aacagtctctgcttctaaaaacttc

SEQ ID NO: 2120 - DNA, 25 bp, Artificial
  primer
aaaacttctatgtctagtcttccat

SEQ ID NO: 2121 - DNA, 25 bp, Artificial
  primer
taggaaatcctcactgtttaaccat

SEQ ID NO: 2122 - DNA, 25 bp, Artificial
  primer
ggagcctaagtcattaaacggatca

SEQ ID NO: 2123 - DNA, 25 bp, Artificial
  primer
aacggatcatgtctgtacattgtgt

SEQ ID NO: 2124 - DNA, 25 bp, Artificial
  primer
ggaggctattcttgtttctccatct

SEQ ID NO: 2125 - DNA, 25 bp, Artificial
  primer
cagttgtctgcctgtaaaatgttga

SEQ ID NO: 2126 - DNA, 25 bp, Artificial
  primer
ctgcctgtaaaatgttgagtttcga

SEQ ID NO: 2127 - DNA, 25 bp, Artificial
  primer
gatataacagttccttcaaaattgg

SEQ ID NO: 2128 - DNA, 25 bp, Artificial
  primer
ttccttcaaaattggcctaggaaat

SEQ ID NO: 2129 - DNA, 25 bp, Artificial
  primer
cacctccagctgtgaaatggactgc

SEQ ID NO: 2130 - DNA, 25 bp, Artificial
  primer
tccagctgtgaaatggactgcagtc

SEQ ID NO: 2131 - DNA, 25 bp, Artificial
  primer
tgaaatggactgcagtccaccctaa

SEQ ID NO: 2132 - DNA, 25 bp, Artificial
  primer
cctgtgtgtgtgcacagtggcttcc

SEQ ID NO: 2133 - DNA, 25 bp, Artificial
  primer
tatgttttctgttccttggcaaata

SEQ ID NO: 2134 - DNA, 25 bp, Artificial
  primer
gttttctgttccttggcaaataaat

SEQ ID NO: 2135 - DNA, 25 bp, Artificial
  primer
ctgttccttggcaaataaatgaaga

SEQ ID NO: 2136 - DNA, 25 bp, Artificial
  primer
aatgtattgtcctaacggtgtccct

SEQ ID NO: 2137 - DNA, 25 bp, Artificial
  primer
tgtcctaacggtgtccctttaatgt

SEQ ID NO: 2138 - DNA, 25 bp, Artificial
  primer
taacggtgtccctttaatgtttcat

SEQ ID NO: 2139 - DNA, 25 bp, Artificial
  primer
gtgtccctttaatgtttcatatgaa

SEQ ID NO: 2140 - DNA, 25 bp, Artificial
  primer
aatatccttgctcaatgtctggtca

SEQ ID NO: 2141 - DNA, 25 bp, Artificial
  primer
ctatactctctttgacagcagtttg

SEQ ID NO: 2142 - DNA, 25 bp, Artificial
  primer
gacagcagtttggaattcttctagc

SEQ ID NO: 2143 - DNA, 25 bp, Artificial
  primer
ggaattcttctagcacatctatgta

SEQ ID NO: 2144 - DNA, 25 bp, Artificial
  primer
agttttgtctgtaaacctcttgcag

SEQ ID NO: 2145 - DNA, 25 bp, Artificial
  primer
gtgtctgtgccagtatgccggaatc

SEQ ID NO: 2146 - DNA, 25 bp, Artificial
  primer
tgccagtatgccggaatctcagtgc

SEQ ID NO: 2147 - DNA, 25 bp, Artificial
  primer
gccggaatctcagtgcagtgtccag

SEQ ID NO: 2148 - DNA, 25 bp, Artificial
  primer
ggaatctcagtgcagtgtccagact

SEQ ID NO: 2149 - DNA, 25 bp, Artificial
  primer
cagtgtccagactgcgtatttcagt

SEQ ID NO: 2150 - DNA, 25 bp, Artificial
  primer
tgcgtatttcagtttttccacaatg

SEQ ID NO: 2151 - DNA, 25 bp, Artificial
  primer
gtggatagtacatatgaggattatt

SEQ ID NO: 2152 - DNA, 25 bp, Artificial
  primer
ttgggcatcgcatggggggaggcaa

SEQ ID NO: 2153 - DNA, 25 bp, Artificial
  primer
gtgctattgaccactacgtgacacc

SEQ ID NO: 2154 - DNA, 25 bp, Artificial
  primer
acgtgacacctgtgaaggctggccg

SEQ ID NO: 2155 - DNA, 25 bp, Artificial
  primer
gcaaggtttccttgaccaggttgcc

SEQ ID NO: 2156 - DNA, 25 bp, Artificial
  primer
ttgcccttcgcagcaaaggctgtga

SEQ ID NO: 2157 - DNA, 25 bp, Artificial
  primer
ctgtgagccgcgggactctagagaa

SEQ ID NO: 2158 - DNA, 25 bp, Artificial
  primer
agaacccctggacatttgagcgaat

SEQ ID NO: 2159 - DNA, 25 bp, Artificial
  primer
agcgaatagccactgccaacatgct

SEQ ID NO: 2160 - DNA, 25 bp, Artificial
  primer
gtactgagcccatatgacttgaccc

SEQ ID NO: 2161 - DNA, 25 bp, Artificial
  primer
tcagcctacccactgaagtctttgg

SEQ ID NO: 2162 - DNA, 25 bp, Artificial
  primer
gtctttgggtagctcttaagccata

SEQ ID NO: 2163 - DNA, 25 bp, Artificial
  primer
tattacccctctaaagttcttggat

SEQ ID NO: 2164 - DNA, 25 bp, Artificial
  primer
agcaagagagcggcctcaggtggag

SEQ ID NO: 2165 - DNA, 25 bp, Artificial
  primer
ggagctcacctttgaggagactgag

SEQ ID NO: 2166 - DNA, 25 bp, Artificial
  primer
gacaccatcagggctatgctagaag

SEQ ID NO: 2167 - DNA, 25 bp, Artificial
  primer
gaagctctggaggaactgcaactgg

SEQ ID NO: 2168 - DNA, 25 bp, Artificial
  primer
aactgcaactggaatccccgaagct

SEQ ID NO: 2169 - DNA, 25 bp, Artificial
  primer
tccatgctgaggccatcaagcggga

SEQ ID NO: 2170 - DNA, 25 bp, Artificial
  primer
atcaagcgggatcctaacctgttcc

SEQ ID NO: 2171 - DNA, 25 bp, Artificial
  primer
gaaggaagggccacattacacacca

SEQ ID NO: 2172 - DNA, 25 bp, Artificial
  primer
ggctgctatccttaacatgctgccc

SEQ ID NO: 2173 - DNA, 25 bp, Artificial
  primer
ttaacatgctgcccctgagagtagg

SEQ ID NO: 2174 - DNA, 25 bp, Artificial
  primer
ggaaccttgtcctgttagtcagaga

SEQ ID NO: 2175 - DNA, 25 bp, Artificial
  primer
caggatgtttggatactgccccagg

SEQ ID NO: 2176 - DNA, 25 bp, Artificial
  primer
gcctggggagacccttcgaggaaca

SEQ ID NO: 2177 - DNA, 25 bp, Artificial
  primer
gaaatgcaccctgtgggcactacac

SEQ ID NO: 2178 - DNA, 25 bp, Artificial
  primer
gtaacctcggagccaaggtgttctt

SEQ ID NO: 2179 - DNA, 25 bp, Artificial
  primer
ggtgttcttcttcaaagcactgcta

SEQ ID NO: 2180 - DNA, 25 bp, Artificial
  primer
actggagacttttcccaggctggga

SEQ ID NO: 2181 - DNA, 25 bp, Artificial
  primer
aagggccatcatgtgtgggtcacta

SEQ ID NO: 2182 - DNA, 25 bp, Artificial
  primer
tttcagacctctgatgggccgagct

SEQ ID NO: 2183 - DNA, 25 bp, Artificial
  primer
gtggacggtgctcagacaagtctgg

SEQ ID NO: 2184 - DNA, 25 bp, Artificial
  primer
gtgattgcctcacatttgcaggtaa

SEQ ID NO: 2185 - DNA, 25 bp, Artificial
  primer
acacagatccaggtagtctctgcta

SEQ ID NO: 2186 - DNA, 25 bp, Artificial
  primer
gtctctgctagtaatgagccccttg

SEQ ID NO: 2187 - DNA, 25 bp, Artificial
  primer
agcacagacagcaggcatagccgca

SEQ ID NO: 2188 - DNA, 25 bp, Artificial
  primer
agccgcagcggcgagagctaaacaa

SEQ ID NO: 2189 - DNA, 25 bp, Artificial
  primer
caaaagggcgtgatccacatccgag

SEQ ID NO: 2190 - DNA, 25 bp, Artificial
  primer
ttgtctgccatgcacggactgatca

SEQ ID NO: 2191 - DNA, 25 bp, Artificial
  primer
ggactgatcatgggcggcctggaag

SEQ ID NO: 2192 - DNA, 25 bp, Artificial
  primer
ctcagctccagtgggaccttgtaaa

SEQ ID NO: 2193 - DNA, 25 bp, Artificial
  primer
ggaccttgtaaaatgctccctgtca

SEQ ID NO: 2194 - DNA, 25 bp, Artificial
  primer
tccctgtcagagctctccagaatat

SEQ ID NO: 2195 - DNA, 25 bp, Artificial
  primer
ggtgtgccccagaagtaagctttgc

SEQ ID NO: 2196 - DNA, 25 bp, Artificial
  primer
tgggtcatttacatgtacactacat

SEQ ID NO: 2197 - DNA, 25 bp, Artificial
  primer
gatactcatgttgcatgttctttta

SEQ ID NO: 2198 - DNA, 25 bp, Artificial
  primer
tagtgattttgtgtcttaagtcttt

SEQ ID NO: 2199 - DNA, 25 bp, Artificial
  primer
taagtctttaacttccaatacttca

SEQ ID NO: 2200 - DNA, 25 bp, Artificial
  primer
gtatgtaaccttccatgtttgcttc

SEQ ID NO: 2201 - DNA, 25 bp, Artificial
  primer
ggaaatgtaggttcactgccacttc

SEQ ID NO: 2202 - DNA, 25 bp, Artificial
  primer
ggttcactgccacttcatgagatat

SEQ ID NO: 2203 - DNA, 25 bp, Artificial
  primer
catgagatatctctgctcacgcttc

SEQ ID NO: 2204 - DNA, 25 bp, Artificial
  primer
caaagttgggtttgccattcatccc

SEQ ID NO: 2205 - DNA, 25 bp, Artificial
  primer
atggtaaatcttgtgttgttccctg

SEQ ID NO: 2206 - DNA, 25 bp, Artificial
  primer
tgtcctccgtattacgtgaccggca

SEQ ID NO: 2207 - DNA, 25 bp, Artificial
  primer
gctcctgacactgctggagaggccc

SEQ ID NO: 2208 - DNA, 25 bp, Artificial
  primer
gcagtcccagcggtgggacctaggg

SEQ ID NO: 2209 - DNA, 25 bp, Artificial
  primer
acctagggaggcatggtctgccctc

SEQ ID NO: 2210 - DNA, 25 bp, Artificial
  primer
ccagccgagcaggaggcctaggagg

SEQ ID NO: 2211 - DNA, 25 bp, Artificial
  primer
gcctaggagggtcctctgagactcc

SEQ ID NO: 2212 - DNA, 25 bp, Artificial
  primer
ctgagactccagacctgaggcgaga

SEQ ID NO: 2213 - DNA, 25 bp, Artificial
  primer
tgaggcgagaagggctgcttccctg

SEQ ID NO: 2214 - DNA, 25 bp, Artificial
  primer
cctgggtccaatgctcaggtgctgg

SEQ ID NO: 2215 - DNA, 25 bp, Artificial
  primer
gggcctggttcccggagaagtgtgc

SEQ ID NO: 2216 - DNA, 25 bp, Artificial
  primer
ccttctacctagcgggatggggctc

SEQ ID NO: 2217 - DNA, 25 bp, Artificial
  primer
ctttcttccgatctgtacctgagag

SEQ ID NO: 2218 - DNA, 25 bp, Artificial
  primer
tgtgctgtttttcaatttgcctaat

SEQ ID NO: 2219 - DNA, 25 bp, Artificial
  primer
gcctgccttatttgcttactgagca

SEQ ID NO: 2220 - DNA, 25 bp, Artificial
  primer
caactctgggttcacacacaagctg

SEQ ID NO: 2221 - DNA, 25 bp, Artificial
  primer
aattatatagtgcttttctccctca

SEQ ID NO: 2222 - DNA, 25 bp, Artificial
  primer
tctccctcaaagtatttttctagcc

SEQ ID NO: 2223 - DNA, 25 bp, Artificial
  primer
attcattttatcttcattatccctg

SEQ ID NO: 2224 - DNA, 25 bp, Artificial
  primer
gaggggtgctgaatttttaggccaa

SEQ ID NO: 2225 - DNA, 25 bp, Artificial
  primer
atcactcactaactgtagagccttg

SEQ ID NO: 2226 - DNA, 25 bp, Artificial
  primer
gagccttgggcattatcagtgaact

SEQ ID NO: 2227 - DNA, 25 bp, Artificial
  primer
tactctgagatttactgtcttcatc

SEQ ID NO: 2228 - DNA, 25 bp, Artificial
  primer
taatgagtagaatgtccgtgatgcc

SEQ ID NO: 2229 - DNA, 25 bp, Artificial
  primer
ggctttttgttctgttggtgtgatt

SEQ ID NO: 2230 - DNA, 25 bp, Artificial
  primer
tgacttccgaatagaatgttttctt

SEQ ID NO: 2231 - DNA, 25 bp, Artificial
  primer
gcaactattgttgtgttacagtgtt

SEQ ID NO: 2232 - DNA, 25 bp, Artificial
  primer
gtgtactgtgtaagccttgcaaaca

SEQ ID NO: 2233 - DNA, 25 bp, Artificial
  primer
agcctgctgtgtggcatctgaactt

SEQ ID NO: 2234 - DNA, 25 bp, Artificial
  primer
aggtttccttgtgccaaataagtgc

SEQ ID NO: 2235 - DNA, 25 bp, Artificial
  primer
gcatatgttatagttccagaagaat

SEQ ID NO: 2236 - DNA, 25 bp, Artificial
  primer
ggataatatctttgatgacttctga

SEQ ID NO: 2237 - DNA, 25 bp, Artificial
  primer
gatgacttctgaaagttatgcttcc

SEQ ID NO: 2238 - DNA, 25 bp, Artificial
  primer
ttatgcttcccttcatgttatatgc

SEQ ID NO: 2239 - DNA, 25 bp, Artificial
  primer
cacattgccaagaattactgtcaag

SEQ ID NO: 2240 - DNA, 25 bp, Artificial
  primer
tttttccttcactaccttaaatatg

SEQ ID NO: 2241 - DNA, 25 bp, Artificial
  primer
gggtaccttagttttctctattcat

SEQ ID NO: 2242 - DNA, 25 bp, Artificial
  primer
atttcagctgattgatctgtgtgac

SEQ ID NO: 2243 - DNA, 25 bp, Artificial
  primer
ataatcagcacatcacttagttcaa

SEQ ID NO: 2244 - DNA, 25 bp, Artificial
  primer
acaaaattccccagcaaatgttaga

SEQ ID NO: 2245 - DNA, 25 bp, Artificial
  primer
gtaggtatatcagtcacctggggag

SEQ ID NO: 2246 - DNA, 25 bp, Artificial
  primer
tggggagttttcttcataatatgca

SEQ ID NO: 2247 - DNA, 25 bp, Artificial
  primer
catacatagttatcatcctccttct

SEQ ID NO: 2248 - DNA, 25 bp, Artificial
  primer
ccacatgcttgccagttcttgaagg

SEQ ID NO: 2249 - DNA, 25 bp, Artificial
  primer
tggacagttgcttaacatggtcata

SEQ ID NO: 2250 - DNA, 25 bp, Artificial
  primer
atatttctctcactggatagttttt

SEQ ID NO: 2251 - DNA, 25 bp, Artificial
  primer
acgtttcctgtattctaatctattt

SEQ ID NO: 2252 - DNA, 25 bp, Artificial
  primer
atcttccaacttccaatatttatcc

SEQ ID NO: 2253 - DNA, 25 bp, Artificial
  primer
tttatccattcgttgtggacccaca

SEQ ID NO: 2254 - DNA, 25 bp, Artificial
  primer
gtggacccacagattgcatctttaa

SEQ ID NO: 2255 - DNA, 25 bp, Artificial
  primer
ttatgtttctagtctttcaagctta

SEQ ID NO: 2256 - DNA, 25 bp, Artificial
  primer
ggttacctcagtattacagccaata

SEQ ID NO: 2257 - DNA, 25 bp, Artificial
  primer
tatagtccaagggaccatttctccc

SEQ ID NO: 2258 - DNA, 25 bp, Artificial
  primer
cccgagtctcttacactttattgtg

SEQ ID NO: 2259 - DNA, 25 bp, Artificial
  primer
gatgtccacgtttttgtgactcttc

SEQ ID NO: 2260 - DNA, 25 bp, Artificial
  primer
gaggtgggacgaatgcacttgcttc

SEQ ID NO: 2261 - DNA, 25 bp, Artificial
  primer
tgcacttgcttcctgtggcaataaa

SEQ ID NO: 2262 - DNA, 25 bp, Artificial
  primer
ctttcctgacattcccatagggtat

SEQ ID NO: 2263 - DNA, 25 bp, Artificial
  primer
agcgatatctgtggccgcagtggct

SEQ ID NO: 2264 - DNA, 25 bp, Artificial
  primer
ggctctgggggccaaggtgttggaa

SEQ ID NO: 2265 - DNA, 25 bp, Artificial
  primer
ggaacgtcacataactttggacaag

SEQ ID NO: 2266 - DNA, 25 bp, Artificial
  primer
gagcctggagaactggccgagctgg

SEQ ID NO: 2267 - DNA, 25 bp, Artificial
  primer
aattccggaaggcaccattctaaca

SEQ ID NO: 2268 - DNA, 25 bp, Artificial
  primer
ttctaacaatggacatgctcaccgt

SEQ ID NO: 2269 - DNA, 25 bp, Artificial
  primer
aaggctatcctcctgaagacatctt

SEQ ID NO: 2270 - DNA, 25 bp, Artificial
  primer
gaagacatctttaatctagtgggca

SEQ ID NO: 2271 - DNA, 25 bp, Artificial
  primer
gtgggcaagaaggtcctggtcactg

SEQ ID NO: 2272 - DNA, 25 bp, Artificial
  primer
gaaggtcctggtcactgttgaagag

SEQ ID NO: 2273 - DNA, 25 bp, Artificial
  primer
atcttttctaactctgcttagctgc

SEQ ID NO: 2274 - DNA, 25 bp, Artificial
  primer
agctgctaataatcctgaggcatag

SEQ ID NO: 2275 - DNA, 25 bp, Artificial
  primer
tagtgattcacagtatccctcttag

SEQ ID NO: 2276 - DNA, 25 bp, Artificial
  primer
agtatccctcttagcattaatttaa

SEQ ID NO: 2277 - DNA, 25 bp, Artificial
  primer
gaggcagattgattttccctctttc

SEQ ID NO: 2278 - DNA, 25 bp, Artificial
  primer
cccaccatgtccttagatctaatct

SEQ ID NO: 2279 - DNA, 25 bp, Artificial
  primer
tagatctaatctgtgctaccttatt

SEQ ID NO: 2280 - DNA, 25 bp, Artificial
  primer
gctaccttattaactcacagcaggc

SEQ ID NO: 2281 - DNA, 25 bp, Artificial
  primer
acagcaggcttactgaatggcttca

SEQ ID NO: 2282 - DNA, 25 bp, Artificial
  primer
cagatttagttgatttctccaccaa

SEQ ID NO: 2283 - DNA, 25 bp, Artificial
  primer
gcatgtcatgtattctcaataggct

SEQ ID NO: 2284 - DNA, 25 bp, Artificial
  primer
gatggggttcactgtttggtgggct

SEQ ID NO: 2285 - DNA, 25 bp, Artificial
  primer
ttcaccctcacccataggagattca

SEQ ID NO: 2286 - DNA, 25 bp, Artificial
  primer
gaaagcttgtgcccaaacatggtga

SEQ ID NO: 2287 - DNA, 25 bp, Artificial
  primer
aatcttgtctatttgtcatccagct

SEQ ID NO: 2288 - DNA, 25 bp, Artificial
  primer
catccagctcaccagttatcaactg

SEQ ID NO: 2289 - DNA, 25 bp, Artificial
  primer
gttatcaactgacgacctatcatgt

SEQ ID NO: 2290 - DNA, 25 bp, Artificial
  primer
gacgacctatcatgtatcttctgta

SEQ ID NO: 2291 - DNA, 25 bp, Artificial
  primer
tatcatgtatcttctgtacccttac

SEQ ID NO: 2292 - DNA, 25 bp, Artificial
  primer
aatcctagacatcaaatcatttcac

SEQ ID NO: 2293 - DNA, 25 bp, Artificial
  primer
agatggcctgtggttatcttggaaa

SEQ ID NO: 2294 - DNA, 25 bp, Artificial
  primer
gttggtttattgttgaattcctaga

SEQ ID NO: 2295 - DNA, 25 bp, Artificial
  primer
atctgaggtgagttgggggtatcta

SEQ ID NO: 2296 - DNA, 25 bp, Artificial
  primer
ggcttgatgtcctagaagttctttg

SEQ ID NO: 2297 - DNA, 25 bp, Artificial
  primer
agttctttgatccagaggtgggtgc

SEQ ID NO: 2298 - DNA, 25 bp, Artificial
  primer
gaggtgggtgcagctgaaagtaaac

SEQ ID NO: 2299 - DNA, 25 bp, Artificial
  primer
tgccagttacatgtatgcctgccca

SEQ ID NO: 2300 - DNA, 25 bp, Artificial
  primer
ccagttccctttttatttgcagaag

SEQ ID NO: 2301 - DNA, 25 bp, Artificial
  primer
ttttgttcacaattaggttcctagg

SEQ ID NO: 2302 - DNA, 25 bp, Artificial
  primer
aacgagcagggtgttttctctcttc

SEQ ID NO: 2303 - DNA, 25 bp, Artificial
  primer
caggaattgacttatactcttgaga

SEQ ID NO: 2304 - DNA, 25 bp, Artificial
  primer
atgggggatggtgagctgtgactgc

SEQ ID NO: 2305 - DNA, 25 bp, Artificial
  primer
actgctttgctgaccattttggatg

SEQ ID NO: 2306 - DNA, 25 bp, Artificial
  primer
ggggcccaaggaattcgcaagatgg

SEQ ID NO: 2307 - DNA, 25 bp, Artificial
  primer
aggaattcgcaagatggcgccgtcc

SEQ ID NO: 2308 - DNA, 25 bp, Artificial
  primer
gcccttcagtgcgatcaaagttcta

SEQ ID NO: 2309 - DNA, 25 bp, Artificial
  primer
gtgcgatcaaagttctacgtgcgag

SEQ ID NO: 2310 - DNA, 25 bp, Artificial
  primer
ttctacgtgcgagagccgccgaatg

SEQ ID NO: 2311 - DNA, 25 bp, Artificial
  primer
ccgccgaatgccaaacctgactggc

SEQ ID NO: 2312 - DNA, 25 bp, Artificial
  primer
acctgactggctgaaagttgggttc

SEQ ID NO: 2313 - DNA, 25 bp, Artificial
  primer
tgaaagttgggttcaccttgggcac

SEQ ID NO: 2314 - DNA, 25 bp, Artificial
  primer
gtcttcttgtggatctatctcatca

SEQ ID NO: 2315 - DNA, 25 bp, Artificial
  primer
ggatctatctcatcaaacaacacaa

SEQ ID NO: 2316 - DNA, 25 bp, Artificial
  primer
caagccagcatttgtattttgcatc

SEQ ID NO: 2317 - DNA, 25 bp, Artificial
  primer
aagctatatctattctaaaccttat

SEQ ID NO: 2318 - DNA, 25 bp, Artificial
  primer
ttagacattggtaccagttacccag

SEQ ID NO: 2319 - DNA, 25 bp, Artificial
  primer
ggtggatgaagggtatctctatata

SEQ ID NO: 2320 - DNA, 25 bp, Artificial
  primer
aagtgctcaacaatgtgcaatgatt

SEQ ID NO: 2321 - DNA, 25 bp, Artificial
  primer
gtaagatattacagccatttcatga

SEQ ID NO: 2322 - DNA, 25 bp, Artificial
  primer
atgctttaccattcaacatagtatc

SEQ ID NO: 2323 - DNA, 25 bp, Artificial
  primer
gtatctattacaaaacacctttctt

SEQ ID NO: 2324 - DNA, 25 bp, Artificial
  primer
aacacctttcttgtatccatatact

SEQ ID NO: 2325 - DNA, 25 bp, Artificial
  primer
gtatccatatacttcaggtgttgct

SEQ ID NO: 2326 - DNA, 25 bp, Artificial
  primer
aacccacaaatgcatacttaccctg

SEQ ID NO: 2327 - DNA, 25 bp, Artificial
  primer
ttaccctgtgcctcatatttcaata

SEQ ID NO: 2328 - DNA, 25 bp, Artificial
  primer
gaagcctgtgtcgaggcagcttccc

SEQ ID NO: 2329 - DNA, 25 bp, Artificial
  primer
tccctttgcctgctgatattctgca

SEQ ID NO: 2330 - DNA, 25 bp, Artificial
  primer
gcaacctgcatttcactttgtggtc

SEQ ID NO: 2331 - DNA, 25 bp, Artificial
  primer
tttcactttgtggtcaggccgtgtc

SEQ ID NO: 2332 - DNA, 25 bp, Artificial
  primer
cgtgtctttgtgctgtgactgcatc

SEQ ID NO: 2333 - DNA, 25 bp, Artificial
  primer
gtgactgcatcacctttatggagtg

SEQ ID NO: 2334 - DNA, 25 bp, Artificial
  primer
gtccttggtgttctccacaagtggt

SEQ ID NO: 2335 - DNA, 25 bp, Artificial
  primer
ggttgacatttgactgcttgttcca

SEQ ID NO: 2336 - DNA, 25 bp, Artificial
  primer
tttgacagtgtgggtcgttcctggg

SEQ ID NO: 2337 - DNA, 25 bp, Artificial
  primer
ttctgagtcattgcatcctctacca

SEQ ID NO: 2338 - DNA, 25 bp, Artificial
  primer
tctaccagctgttaatccatcactc

SEQ ID NO: 2339 - DNA, 25 bp, Artificial
  primer
attttgccttagctactgcagtgga

SEQ ID NO: 2340 - DNA, 25 bp, Artificial
  primer
tggcttgcttttggaccttggatgt

SEQ ID NO: 2341 - DNA, 25 bp, Artificial
  primer
ttggatgtgtcacctgaactctctg

SEQ ID NO: 2342 - DNA, 25 bp, Artificial
  primer
tctggacctcaggtttccatctgta

SEQ ID NO: 2343 - DNA, 25 bp, Artificial
  primer
atcttctcatccctaggacaagcat

SEQ ID NO: 2344 - DNA, 25 bp, Artificial
  primer
gcatagtgcctgcatgcttcatgat

SEQ ID NO: 2345 - DNA, 25 bp, Artificial
  primer
atgatcagtaagtcctggctgcata

SEQ ID NO: 2346 - DNA, 25 bp, Artificial
  primer
accaggggacttaccttttcacatg

SEQ ID NO: 2347 - DNA, 25 bp, Artificial
  primer
acttacccctcatccgagtgtgagg

SEQ ID NO: 2348 - DNA, 25 bp, Artificial
  primer
caagcaggtgtcatggcaggaagga

SEQ ID NO: 2349 - DNA, 25 bp, Artificial
  primer
gaccagatctgtatgatttgttcca

SEQ ID NO: 2350 - DNA, 25 bp, Artificial
  primer
tgaacgaatttattttcccctcagt

SEQ ID NO: 2351 - DNA, 25 bp, Artificial
  primer
tatgttggtttagctgcagcctcct

SEQ ID NO: 2352 - DNA, 25 bp, Artificial
  primer
gttgcatcaagaacccatagggtgt

SEQ ID NO: 2353 - DNA, 25 bp, Artificial
  primer
tgggaacgccagggtgtaggatata

SEQ ID NO: 2354 - DNA, 25 bp, Artificial
  primer
aggatataaaaacgcactcttgaga

SEQ ID NO: 2355 - DNA, 25 bp, Artificial
  primer
gtgctgaaaacttgcatggtgcttt

SEQ ID NO: 2356 - DNA, 25 bp, Artificial
  primer
ggtgctttcagacattagccttgtt

SEQ ID NO: 2357 - DNA, 25 bp, Artificial
  primer
gacagatccatagtgtgcatgggca

SEQ ID NO: 2358 - DNA, 25 bp, Artificial
  primer
ggcagacacattttgcctctatgtc

SEQ ID NO: 2359 - DNA, 25 bp, Artificial
  primer
actctttccagtaatcctaatttgc

SEQ ID NO: 2360 - DNA, 25 bp, Artificial
  primer
tgcacgaagatataatgtccacatt

SEQ ID NO: 2361 - DNA, 25 bp, Artificial
  primer
atgcaggatccaaaccaagccgatg

SEQ ID NO: 2362 - DNA, 25 bp, Artificial
  primer
ctaaccccacgccatgtgatggagc

SEQ ID NO: 2363 - DNA, 25 bp, Artificial
  primer
gctgatcaaggtcatgtttctcact

SEQ ID NO: 2364 - DNA, 25 bp, Artificial
  primer
acattgatgatcacattctgccctt

SEQ ID NO: 2365 - DNA, 25 bp, Artificial
  primer
cattctgccctttactacaggacag

SEQ ID NO: 2366 - DNA, 25 bp, Artificial
  primer
gaagttgcaagcctttgtcttactc

SEQ ID NO: 2367 - DNA, 25 bp, Artificial
  primer
gtcttactctttcagtcaggaccta

SEQ ID NO: 2368 - DNA, 25 bp, Artificial
  primer
gccagccatctcagcagggaagaac

SEQ ID NO: 2369 - DNA, 25 bp, Artificial
  primer
gaacaaccttctcaaccaaaactgc

SEQ ID NO: 2370 - DNA, 25 bp, Artificial
  primer
ggtgggggaatctcacactgactaa

SEQ ID NO: 2371 - DNA, 25 bp, Artificial
  primer
ggacgctttgtattcagagatggct

SEQ ID NO: 2372 - DNA, 25 bp, Artificial
  primer
gcaggcagagcagctactgactttg

SEQ ID NO: 2373 - DNA, 25 bp, Artificial
  primer
agtacagtgacactctggtgcccat

SEQ ID NO: 2374 - DNA, 25 bp, Artificial
  primer
cattggcagatggcgacttccctgc

SEQ ID NO: 2375 - DNA, 25 bp, Artificial
  primer
ttcctccttttcagaactactctgt

SEQ ID NO: 2376 - DNA, 25 bp, Artificial
  primer
actactctgtgctaattgttctgcc

SEQ ID NO: 2377 - DNA, 25 bp, Artificial
  primer
tgccagtatgggcgcatcagctcca

SEQ ID NO: 2378 - DNA, 25 bp, Artificial
  primer
aaactttgtaggcaccttctgcttc

SEQ ID NO: 2379 - DNA, 25 bp, Artificial
  primer
ctctgcttcattgttcctgtgatag

SEQ ID NO: 2380 - DNA, 25 bp, Artificial
  primer
gttcctgtgatagtcctgttgttat

SEQ ID NO: 2381 - DNA, 25 bp, Artificial
  primer
ggaggcaggccaggacatcaaagtc

SEQ ID NO: 2382 - DNA, 25 bp, Artificial
  primer
gtatctcatggcctcttgatgtgga

SEQ ID NO: 2383 - DNA, 25 bp, Artificial
  primer
ttgggagtgagaatgccgggcccct

SEQ ID NO: 2384 - DNA, 25 bp, Artificial
  primer
cagggctgtcggtgtgctgtcagcc

SEQ ID NO: 2385 - DNA, 25 bp, Artificial
  primer
acaccagtgtcgtgtctgctgttgt

SEQ ID NO: 2386 - DNA, 25 bp, Artificial
  primer
gggaccgttgttaacacgtgacact

SEQ ID NO: 2387 - DNA, 25 bp, Artificial
  primer
gtgacactgtgggtctgactttctc

SEQ ID NO: 2388 - DNA, 25 bp, Artificial
  primer
acgtcctttcctgaagtgtcgagtc

SEQ ID NO: 2389 - DNA, 25 bp, Artificial
  primer
agaatgcacattggaagctcccacc

SEQ ID NO: 2390 - DNA, 25 bp, Artificial
  primer
cccaccccatattgttcttcaaagt

SEQ ID NO: 2391 - DNA, 25 bp, Artificial
  primer
tcaaagtggaggtctcccctgatcc

SEQ ID NO: 2392 - DNA, 25 bp, Artificial
  primer
cagcaccaagcgtgattcctgctgc

SEQ ID NO: 2393 - DNA, 25 bp, Artificial
  primer
ctgcctgtattctctattccaataa

SEQ ID NO: 2394 - DNA, 25 bp, Artificial
  primer
ggggctttgaaataacaccaccagt

SEQ ID NO: 2395 - DNA, 25 bp, Artificial
  primer
caccaccagtggtcttaaggttgaa

SEQ ID NO: 2396 - DNA, 25 bp, Artificial
  primer
gaagtgtggttcagggccagtgcat

SEQ ID NO: 2397 - DNA, 25 bp, Artificial
  primer
gggccagtgcatattagtggacagc

SEQ ID NO: 2398 - DNA, 25 bp, Artificial
  primer
tatatctggaaagcggtctgcccct

SEQ ID NO: 2399 - DNA, 25 bp, Artificial
  primer
tctgcccctggaggtggtagcaagg

SEQ ID NO: 2400 - DNA, 25 bp, Artificial
  primer
gagatactccagccaaaaatgcaca

SEQ ID NO: 2401 - DNA, 25 bp, Artificial
  primer
gactcaaaaccatcatcaacaccaa

SEQ ID NO: 2402 - DNA, 25 bp, Artificial
  primer
acaccaaaaggacctagttctgtag

SEQ ID NO: 2403 - DNA, 25 bp, Artificial
  primer
aaagcgcattgaacagtcctgggca

SEQ ID NO: 2404 - DNA, 25 bp, Artificial
  primer
aacagtcctgggcactacatgtaaa

SEQ ID NO: 2405 - DNA, 25 bp, Artificial
  primer
agagcggaaaggacctcctggactc

SEQ ID NO: 2406 - DNA, 25 bp, Artificial
  primer
ccaagtcagatagtcttctgctgct

SEQ ID NO: 2407 - DNA, 25 bp, Artificial
  primer
cagatagtcttctgctgctggtacc

SEQ ID NO: 2408 - DNA, 25 bp, Artificial
  primer
tgctggtacctgggtgggcaatggc

SEQ ID NO: 2409 - DNA, 25 bp, Artificial
  primer
ggtgggcaatggccaccatgtctgc

SEQ ID NO: 2410 - DNA, 25 bp, Artificial
  primer
gaaatggacattttcatatgcaatg

SEQ ID NO: 2411 - DNA, 25 bp, Artificial
  primer
atatgcaatggaaaacagccacaaa

SEQ ID NO: 2412 - DNA, 25 bp, Artificial
  primer
gccacaaaaaaacctaccttatatg

SEQ ID NO: 2413 - DNA, 25 bp, Artificial
  primer
tatatggaagttgtagccctctgca

SEQ ID NO: 2414 - DNA, 25 bp, Artificial
  primer
cttcctccctactttctgtaaatat

SEQ ID NO: 2415 - DNA, 25 bp, Artificial
  primer
tctgtaaatatctgtatctaaacca

SEQ ID NO: 2416 - DNA, 25 bp, Artificial
  primer
ttatgattaatcaccatctgcctcc

SEQ ID NO: 2417 - DNA, 25 bp, Artificial
  primer
ccaggcctttcatctcatgacaaac

SEQ ID NO: 2418 - DNA, 25 bp, Artificial
  primer
atcgtgtcactctgttaaatgttca

SEQ ID NO: 2419 - DNA, 25 bp, Artificial
  primer
tgttcatactgtttcaagcccatat

SEQ ID NO: 2420 - DNA, 25 bp, Artificial
  primer
tgttgtctccatatcttgatggctt

SEQ ID NO: 2421 - DNA, 25 bp, Artificial
  primer
ggcttttgggagcatttcacacaag

SEQ ID NO: 2422 - DNA, 25 bp, Artificial
  primer
caggtttgtggttgaggacttctct

SEQ ID NO: 2423 - DNA, 25 bp, Artificial
  primer
ggacttctctgtccgatgtctacat

SEQ ID NO: 2424 - DNA, 25 bp, Artificial
  primer
gtctacattcaggttctgacttcat

SEQ ID NO: 2425 - DNA, 25 bp, Artificial
  primer
tccctgtctttttcagtgtctcata

SEQ ID NO: 2426 - DNA, 25 bp, Artificial
  primer
gtctcataaacgctactctggattg

SEQ ID NO: 2427 - DNA, 25 bp, Artificial
  primer
gaagtaccaccactgtgtgggtgag

SEQ ID NO: 2428 - DNA, 25 bp, Artificial
  primer
agtaccgctgggtggagcagcacct

SEQ ID NO: 2429 - DNA, 25 bp, Artificial
  primer
gtagaacgaattatcctgacaaggg

SEQ ID NO: 2430 - DNA, 25 bp, Artificial
  primer
tcttgggggacctgctcattgatga

SEQ ID NO: 2431 - DNA, 25 bp, Artificial
  primer
gacaaggacacagttcgaggccagg

SEQ ID NO: 2432 - DNA, 25 bp, Artificial
  primer
gccaggaggagaccccaagctggga

SEQ ID NO: 2433 - DNA, 25 bp, Artificial
  primer
caagctgggagcacatcttgttcac

SEQ ID NO: 2434 - DNA, 25 bp, Artificial
  primer
gatagcaagcgcggagctgcgcagc

SEQ ID NO: 2435 - DNA, 25 bp, Artificial
  primer
gctgcgcagcgggaatgagcgggga

SEQ ID NO: 2436 - DNA, 25 bp, Artificial
  primer
ggaatgagcggggatgccgcgggca

SEQ ID NO: 2437 - DNA, 25 bp, Artificial
  primer
aggaagggcaggcccacaggggcca

SEQ ID NO: 2438 - DNA, 25 bp, Artificial
  primer
agggatgttgttgatccccacactg

SEQ ID NO: 2439 - DNA, 25 bp, Artificial
  primer
atccccacactgccttaaggtatat

SEQ ID NO: 2440 - DNA, 25 bp, Artificial
  primer
tcccctggctgtatgtctgacagtc

SEQ ID NO: 2441 - DNA, 25 bp, Artificial
  primer
atagcctgtatggtttctactttat

SEQ ID NO: 2442 - DNA, 25 bp, Artificial
  primer
gggtgggtagaggggtgctttgcct

SEQ ID NO: 2443 - DNA, 25 bp, Artificial
  primer
tgttaattgttcaaactttctgcct

SEQ ID NO: 2444 - DNA, 25 bp, Artificial
  primer
acattcctatcttattgttcgttta

SEQ ID NO: 2445 - DNA, 25 bp, Artificial
  primer
gactattggtgagttgtgcctttta

SEQ ID NO: 2446 - DNA, 25 bp, Artificial
  primer
ttactttttctcatatcctctataa

SEQ ID NO: 2447 - DNA, 25 bp, Artificial
  primer
ataattgacttctattttccttaat

SEQ ID NO: 2448 - DNA, 25 bp, Artificial
  primer
tattttccttaatcaaaccagctct

SEQ ID NO: 2449 - DNA, 25 bp, Artificial
  primer
ttgtttttcaggccattcacctgcc

SEQ ID NO: 2450 - DNA, 25 bp, Artificial
  primer
cctgtcagtagtggcctgtattaga

SEQ ID NO: 2451 - DNA, 25 bp, Artificial
  primer
aagagtggtttgtgctcaggctggg

SEQ ID NO: 2452 - DNA, 25 bp, Artificial
  primer
ggaacagagaggcacgctatgctgc

SEQ ID NO: 2453 - DNA, 25 bp, Artificial
  primer
cgctatgctgccagaattcccagga

SEQ ID NO: 2454 - DNA, 25 bp, Artificial
  primer
ttcccaggagggcatatcagcaact

SEQ ID NO: 2455 - DNA, 25 bp, Artificial
  primer
ttgagcttccattttgagtaacaga

SEQ ID NO: 2456 - DNA, 25 bp, Artificial
  primer
tttatcattgatgcctactgaaata

SEQ ID NO: 2457 - DNA, 25 bp, Artificial
  primer
agacaggatccctagcttgttttct

SEQ ID NO: 2458 - DNA, 25 bp, Artificial
  primer
gcaacaacaatcatgcttatgacca

SEQ ID NO: 2459 - DNA, 25 bp, Artificial
  primer
gaccaatacagtcactaggttgtag

SEQ ID NO: 2460 - DNA, 25 bp, Artificial
  primer
agcgtgttcccaatagtgtactctg

SEQ ID NO: 2461 - DNA, 25 bp, Artificial
  primer
tactctggctgttgcgttttccagc

SEQ ID NO: 2462 - DNA, 25 bp, Artificial
  primer
gccccagaaccgtatcattttttca

SEQ ID NO: 2463 - DNA, 25 bp, Artificial
  primer
gaggaacacgtcaggagaggccagc

SEQ ID NO: 2464 - DNA, 25 bp, Artificial
  primer
ggacactccactctgtaatgggcac

SEQ ID NO: 2465 - DNA, 25 bp, Artificial
  primer
gatggatgtcctctgggcagggacc

SEQ ID NO: 2466 - DNA, 25 bp, Artificial
  primer
acccccatggtgactatgccaggag

SEQ ID NO: 2467 - DNA, 25 bp, Artificial
  primer
aggagagactcttgcttctcgagtt

SEQ ID NO: 2468 - DNA, 25 bp, Artificial
  primer
atcccagctcacttgcttaggttgt

SEQ ID NO: 2469 - DNA, 25 bp, Artificial
  primer
gagcggctctatctacagatgtggg

SEQ ID NO: 2470 - DNA, 25 bp, Artificial
  primer
tgcagctggcaacaaacctgaccac

SEQ ID NO: 2471 - DNA, 25 bp, Artificial
  primer
gataacatacttcttacttgtctgt

SEQ ID NO: 2472 - DNA, 25 bp, Artificial
  primer
acttgtctgtacagtaccttgttgc

SEQ ID NO: 2473 - DNA, 25 bp, Artificial
  primer
agacttgcttcctgcatggtaggga

SEQ ID NO: 2474 - DNA, 25 bp, Artificial
  primer
aactgcttttccacaaggaatctcc

SEQ ID NO: 2475 - DNA, 25 bp, Artificial
  primer
gaattttgcggcgaccagatggtgc

SEQ ID NO: 2476 - DNA, 25 bp, Artificial
  primer
aggtctggaaggtctgatctccctt

SEQ ID NO: 2477 - DNA, 25 bp, Artificial
  primer
tcccttggtcttccatgggatggtt

SEQ ID NO: 2478 - DNA, 25 bp, Artificial
  primer
ggagatatagattgtccggccgctt

SEQ ID NO: 2479 - DNA, 25 bp, Artificial
  primer
ggccgctttgtgattccatggattg

SEQ ID NO: 2480 - DNA, 25 bp, Artificial
  primer
atgttactccctgttttagtttctg

SEQ ID NO: 2481 - DNA, 25 bp, Artificial
  primer
gggactttgctggtgtagtcttttt

SEQ ID NO: 2482 - DNA, 25 bp, Artificial
  primer
ttatgatattgccctctttgtattc

SEQ ID NO: 2483 - DNA, 25 bp, Artificial
  primer
tgtattcccattttccacagttttt

SEQ ID NO: 2484 - DNA, 25 bp, Artificial
  primer
gttttttccgcagacttctttctgc

SEQ ID NO: 2485 - DNA, 25 bp, Artificial
  primer
aattattcagcctccaaatgcaaat

SEQ ID NO: 2486 - DNA, 25 bp, Artificial
  primer
atggcagagagtggtgcttcccagc

SEQ ID NO: 2487 - DNA, 25 bp, Artificial
  primer
tgcttcccagcctcacaatgtggga

SEQ ID NO: 2488 - DNA, 25 bp, Artificial
  primer
taatggtttttctctcagttctcta

SEQ ID NO: 2489 - DNA, 25 bp, Artificial
  primer
agttctctaagctggtctatgttat

SEQ ID NO: 2490 - DNA, 25 bp, Artificial
  primer
aatatgcttaccttttgaatgatca

SEQ ID NO: 2491 - DNA, 25 bp, Artificial
  primer
aacttaccttgttttcacttgtgca

SEQ ID NO: 2492 - DNA, 25 bp, Artificial
  primer
acttatattttgcctgagcttgatc

SEQ ID NO: 2493 - DNA, 25 bp, Artificial
  primer
ggtacctccgtcggcagatttgagc

SEQ ID NO: 2494 - DNA, 25 bp, Artificial
  primer
agatttgagctttctccttggacac

SEQ ID NO: 2495 - DNA, 25 bp, Artificial
  primer
ccttggacacctaatacccacagtc

SEQ ID NO: 2496 - DNA, 25 bp, Artificial
  primer
tgcgttctgacacctgtcggatagt

SEQ ID NO: 2497 - DNA, 25 bp, Artificial
  primer
gtcggcagatttgagctttcttctt

SEQ ID NO: 2498 - DNA, 25 bp, Artificial
  primer
tttcttcttggacacctatacccac

SEQ ID NO: 2499 - DNA, 25 bp, Artificial
  primer
cagtcctccagtgttttagacgccc

SEQ ID NO: 2500 - DNA, 25 bp, Artificial
  primer
gcccagctgcacaacttgattgcct

SEQ ID NO: 2501 - DNA, 25 bp, Artificial
  primer
gattgccttacaaatgacctgcttc

SEQ ID NO: 2502 - DNA, 25 bp, Artificial
  primer
atgacctgcttccaggatgcggaaa

SEQ ID NO: 2503 - DNA, 25 bp, Artificial
  primer
aattcctaatttcttctgtgaccct

SEQ ID NO: 2504 - DNA, 25 bp, Artificial
  primer
tggtcacagcgctagtcattcattt

SEQ ID NO: 2505 - DNA, 25 bp, Artificial
  primer
tgaaaacatgcacaaccacagcctc

SEQ ID NO: 2506 - DNA, 25 bp, Artificial
  primer
ccacagcctcaatcttgtatttagt

SEQ ID NO: 2507 - DNA, 25 bp, Artificial
  primer
tttcctgtggattattttttcctca

SEQ ID NO: 2508 - DNA, 25 bp, Artificial
  primer
gactaaaacatacataacgcctgca

SEQ ID NO: 2509 - DNA, 25 bp, Artificial
  primer
aacgcctgcataaatattccatggt

SEQ ID NO: 2510 - DNA, 25 bp, Artificial
  primer
tttcagtttttagcctttacacatg

SEQ ID NO: 2511 - DNA, 25 bp, Artificial
  primer
aatatctggtttttgctgaatgctt

SEQ ID NO: 2512 - DNA, 25 bp, Artificial
  primer
ttactgtgccactccaatatttatc

SEQ ID NO: 2513 - DNA, 25 bp, Artificial
  primer
gctttcttaagaccagttgttcaca

SEQ ID NO: 2514 - DNA, 25 bp, Artificial
  primer
gaccagttgttcacactttgtagat

SEQ ID NO: 2515 - DNA, 25 bp, Artificial
  primer
atagcttcacacagtttgcgctgga

SEQ ID NO: 2516 - DNA, 25 bp, Artificial
  primer
caaagtctttattgccacctactga

SEQ ID NO: 2517 - DNA, 25 bp, Artificial
  primer
gacactcgatttaggccagaccaga

SEQ ID NO: 2518 - DNA, 25 bp, Artificial
  primer
gagagaaaggcggcgggtcttagaa

SEQ ID NO: 2519 - DNA, 25 bp, Artificial
  primer
ggaaatccgacgatgactcttgggt

SEQ ID NO: 2520 - DNA, 25 bp, Artificial
  primer
gagcaacggcacctatttggaactt

SEQ ID NO: 2521 - DNA, 25 bp, Artificial
  primer
actggaccatcctgtcttatggtga

SEQ ID NO: 2522 - DNA, 25 bp, Artificial
  primer
ataacattagtgtatttctcctgtg

SEQ ID NO: 2523 - DNA, 25 bp, Artificial
  primer
gatgatcacttgtgcttagcttagc

SEQ ID NO: 2524 - DNA, 25 bp, Artificial
  primer
tctttaagtctatattttcctcagt

SEQ ID NO: 2525 - DNA, 25 bp, Artificial
  primer
tttcctcagtgcgtttctttacaat

SEQ ID NO: 2526 - DNA, 25 bp, Artificial
  primer
gttatgccttctggctactacagaa

SEQ ID NO: 2527 - DNA, 25 bp, Artificial
  primer
acagaatctccgcagaccttttagt

SEQ ID NO: 2528 - DNA, 25 bp, Artificial
  primer
gaaggtgtccttatggtcttaggaa

SEQ ID NO: 2529 - DNA, 25 bp, Artificial
  primer
atagctattttcatttgctctattt

SEQ ID NO: 2530 - DNA, 25 bp, Artificial
  primer
tgctctattttcctctgcattgtac

SEQ ID NO: 2531 - DNA, 25 bp, Artificial
  primer
gcattgtactaatctgttactcagt

SEQ ID NO: 2532 - DNA, 25 bp, Artificial
  primer
gttactcagtgttagtcttcatttt

SEQ ID NO: 2533 - DNA, 25 bp, Artificial
  primer
gtgttggaaacctgcgtcatgtaaa

SEQ ID NO: 2534 - DNA, 25 bp, Artificial
  primer
aatcttccacttaaccactgaaaat

SEQ ID NO: 2535 - DNA, 25 bp, Artificial
  primer
agctcctattaatttgcttatcccc

SEQ ID NO: 2536 - DNA, 25 bp, Artificial
  primer
tatccccctcatgtagctagttgaa

SEQ ID NO: 2537 - DNA, 25 bp, Artificial
  primer
agtgccgacaggacggtcattgatt

SEQ ID NO: 2538 - DNA, 25 bp, Artificial
  primer
ggacggtcattgattacaacgggga

SEQ ID NO: 2539 - DNA, 25 bp, Artificial
  primer
gattacaacggggaacgcacgctgg

SEQ ID NO: 2540 - DNA, 25 bp, Artificial
  primer
tacaacggggaacgcacgctggatg

SEQ ID NO: 2541 - DNA, 25 bp, Artificial
  primer
gggaacgcacgctggatggttttaa

SEQ ID NO: 2542 - DNA, 25 bp, Artificial
  primer
gaagcagaggagccagacatggagg

SEQ ID NO: 2543 - DNA, 25 bp, Artificial
  primer
aagatgaactgtaatacgcaaagcc

SEQ ID NO: 2544 - DNA, 25 bp, Artificial
  primer
gtttcctgaaaccatgatgtacttt

SEQ ID NO: 2545 - DNA, 25 bp, Artificial
  primer
gtactttttcatacatgagtctgtc

SEQ ID NO: 2546 - DNA, 25 bp, Artificial
  primer
catacatgagtctgtccagagtgct

SEQ ID NO: 2547 - DNA, 25 bp, Artificial
  primer
tgcttgctaccgtgttcggagtctc

SEQ ID NO: 2548 - DNA, 25 bp, Artificial
  primer
aactggcattactgactcccagcta

SEQ ID NO: 2549 - DNA, 25 bp, Artificial
  primer
ccagctatatttctccagacttgca

SEQ ID NO: 2550 - DNA, 25 bp, Artificial
  primer
aattgctgatgtgacccatgaaggg

SEQ ID NO: 2551 - DNA, 25 bp, Artificial
  primer
ttttcctcgtaattttggactgcca

SEQ ID NO: 2552 - DNA, 25 bp, Artificial
  primer
tggactgccacacattggtaccttt

SEQ ID NO: 2553 - DNA, 25 bp, Artificial
  primer
acattggtacctttagttctctgaa

SEQ ID NO: 2554 - DNA, 25 bp, Artificial
  primer
ttctctgaaggcccacgtttttatc

SEQ ID NO: 2555 - DNA, 25 bp, Artificial
  primer
gtagagctttatgttcgctgtccat

SEQ ID NO: 2556 - DNA, 25 bp, Artificial
  primer
gctgtccatgaaaccttctgtaacc

SEQ ID NO: 2557 - DNA, 25 bp, Artificial
  primer
tgactacaagtagttctttctctat

SEQ ID NO: 2558 - DNA, 25 bp, Artificial
  primer
gctatgcttagctatctgtcagaga

SEQ ID NO: 2559 - DNA, 25 bp, Artificial
  primer
aatttccacagatacttcccttaga

SEQ ID NO: 2560 - DNA, 25 bp, Artificial
  primer
tgagcgaggccttgtcaattttaag

SEQ ID NO: 2561 - DNA, 25 bp, Artificial
  primer
taggaaggaccacaacatgacccgt

SEQ ID NO: 2562 - DNA, 25 bp, Artificial
  primer
tacacactttatttacttcgttttg

SEQ ID NO: 2563 - DNA, 25 bp, Artificial
  primer
gttggcttctgtttctagttgagga

SEQ ID NO: 2564 - DNA, 25 bp, Artificial
  primer
tcctctttttccatcataattctaa

SEQ ID NO: 2565 - DNA, 25 bp, Artificial
  primer
gatttgcccatttacacttttgaga

SEQ ID NO: 2566 - DNA, 25 bp, Artificial
  primer
gtaaataaccccattctttgcttga

SEQ ID NO: 2567 - DNA, 25 bp, Artificial
  primer
gtattttcccaatagcactttcatt

SEQ ID NO: 2568 - DNA, 25 bp, Artificial
  primer
attgccagtgtctttctttggtgcc

SEQ ID NO: 2569 - DNA, 25 bp, Artificial
  primer
ttcagcattcttagcctgtggcaat

SEQ ID NO: 2570 - DNA, 25 bp, Artificial
  primer
agcatactatgcagcgttgggaact

SEQ ID NO: 2571 - DNA, 25 bp, Artificial
  primer
cagcgttgggaactaggccacctat

SEQ ID NO: 2572 - DNA, 25 bp, Artificial
  primer
tgaactcttctctgtatgcactaat

SEQ ID NO: 2573 - DNA, 25 bp, Artificial
  primer
agaccctaaagatcgtccttctgct

SEQ ID NO: 2574 - DNA, 25 bp, Artificial
  primer
atgtctagtgatcatctcagctgaa

SEQ ID NO: 2575 - DNA, 25 bp, Artificial
  primer
gtgtggcttgcgtaaataactgttt

SEQ ID NO: 2576 - DNA, 25 bp, Artificial
  primer
gaggaccatagtttcttgttaacat

SEQ ID NO: 2577 - DNA, 25 bp, Artificial
  primer
aagcacttggaattgtactgggttt

SEQ ID NO: 2578 - DNA, 25 bp, Artificial
  primer
gtactttgatactgctcatgctgac

SEQ ID NO: 2579 - DNA, 25 bp, Artificial
  primer
tgctcatgctgacttaaaacactag

SEQ ID NO: 2580 - DNA, 25 bp, Artificial
  primer
ggatctactgacattagcactttgt

SEQ ID NO: 2581 - DNA, 25 bp, Artificial
  primer
ggtgacctcacccatggagggtact

SEQ ID NO: 2582 - DNA, 25 bp, Artificial
  primer
ggtactgtccgcaaggttcatgtga

SEQ ID NO: 2583 - DNA, 25 bp, Artificial
  primer
tggaaggtgacgacctcatcctgga

SEQ ID NO: 2584 - DNA, 25 bp, Artificial
  primer
ggagatcgagtgatcttgccccaga

SEQ ID NO: 2585 - DNA, 25 bp, Artificial
  primer
tcaacagaagctgtgctgccacggc

SEQ ID NO: 2586 - DNA, 25 bp, Artificial
  primer
cagtgcccgaggccaggaaggccgg

SEQ ID NO: 2587 - DNA, 25 bp, Artificial
  primer
gacaccgcctgcggtggttcattcc

SEQ ID NO: 2588 - DNA, 25 bp, Artificial
  primer
gacagctgcttacatgttcatctct

SEQ ID NO: 2589 - DNA, 25 bp, Artificial
  primer
atctcttgccaaataagggtcccct

SEQ ID NO: 2590 - DNA, 25 bp, Artificial
  primer
gggtcaggtggtcctaggacccagg

SEQ ID NO: 2591 - DNA, 25 bp, Artificial
  primer
agatctaagatgtcccaggtcctgg

SEQ ID NO: 2592 - DNA, 25 bp, Artificial
  primer
agatttcctcaagtgtgcatagatc

SEQ ID NO: 2593 - DNA, 25 bp, Artificial
  primer
gtgtgcatagatctgagaggagtcg

SEQ ID NO: 2594 - DNA, 25 bp, Artificial
  primer
gtcgagactcgagattccatcatag

SEQ ID NO: 2595 - DNA, 25 bp, Artificial
  primer
gagattccatcatagcgtaggtgtg

SEQ ID NO: 2596 - DNA, 25 bp, Artificial
  primer
tagcgtaggtgtgtggggttgggag

SEQ ID NO: 2597 - DNA, 25 bp, Artificial
  primer
ccctgatgggcttgtctgtgtttgc

SEQ ID NO: 2598 - DNA, 25 bp, Artificial
  primer
ctgtgtctgaggtcctgtgactgta

SEQ ID NO: 2599 - DNA, 25 bp, Artificial
  primer
tctgaggtcctgtgactgtaccctc

SEQ ID NO: 2600 - DNA, 25 bp, Artificial
  primer
tcctttgccctgggacatctgtatc

SEQ ID NO: 2601 - DNA, 25 bp, Artificial
  primer
catctgtatctcttggctttgtaat

SEQ ID NO: 2602 - DNA, 25 bp, Artificial
  primer
ggctttgtaataaatgctgcatact

SEQ ID NO: 2603 - DNA, 25 bp, Artificial
  primer
gacatagcacgaatctgttaccagt

SEQ ID NO: 2604 - DNA, 25 bp, Artificial
  primer
aattttctaatttcaagtcttcctg

SEQ ID NO: 2605 - DNA, 25 bp, Artificial
  primer
gaatagtgtggttcagtgagctgca

SEQ ID NO: 2606 - DNA, 25 bp, Artificial
  primer
ctgcactgacctctacattttgtat

SEQ ID NO: 2607 - DNA, 25 bp, Artificial
  primer
atgttcagaacttcatctgccactg

SEQ ID NO: 2608 - DNA, 25 bp, Artificial
  primer
atctgccactggttatttttttcta

SEQ ID NO: 2609 - DNA, 25 bp, Artificial
  primer
gaattttacttgcaccttatagttc

SEQ ID NO: 2610 - DNA, 25 bp, Artificial
  primer
tgcaggaaaccctttttgtaagtct

SEQ ID NO: 2611 - DNA, 25 bp, Artificial
  primer
tttgcattttgtttcactctttcca

SEQ ID NO: 2612 - DNA, 25 bp, Artificial
  primer
gataagcagagttgctcttcaccag

SEQ ID NO: 2613 - DNA, 25 bp, Artificial
  primer
tgctcttcaccagtgtttttcttca

SEQ ID NO: 2614 - DNA, 25 bp, Artificial
  primer
tacaccgataacacacaggctgctg

SEQ ID NO: 2615 - DNA, 25 bp, Artificial
  primer
caggctgctgtaactgtcaggacag

SEQ ID NO: 2616 - DNA, 25 bp, Artificial
  primer
gacagtgcgacggtatttttcctag

SEQ ID NO: 2617 - DNA, 25 bp, Artificial
  primer
atggtatacctacctatgcatcatt

SEQ ID NO: 2618 - DNA, 25 bp, Artificial
  primer
aatgtttctggctttgtgtttctcc

SEQ ID NO: 2619 - DNA, 25 bp, Artificial
  primer
atgcgtcaaccaatcgtacgccgtc

SEQ ID NO: 2620 - DNA, 25 bp, Artificial
  primer
cccagagcccgtttgtggctgagtg

SEQ ID NO: 2621 - DNA, 25 bp, Artificial
  primer
gtggctgagtgacaacttgttcccc

SEQ ID NO: 2622 - DNA, 25 bp, Artificial
  primer
cccgcagtgcacacctagaatgctg

SEQ ID NO: 2623 - DNA, 25 bp, Artificial
  primer
ggcacgtgagatgcattgccgcttc

SEQ ID NO: 2624 - DNA, 25 bp, Artificial
  primer
gctgccagtgtttggacagaaccca

SEQ ID NO: 2625 - DNA, 25 bp, Artificial
  primer
tcactcactctgatttatgttttga

SEQ ID NO: 2626 - DNA, 25 bp, Artificial
  primer
ttggggggtattttggtactgtgat

SEQ ID NO: 2627 - DNA, 25 bp, Artificial
  primer
attttggtactgtgatggggtcatc

SEQ ID NO: 2628 - DNA, 25 bp, Artificial
  primer
aagaccaggtctacagtgatagagc

SEQ ID NO: 2629 - DNA, 25 bp, Artificial
  primer
gatcctgagtccagaatggtacaca

SEQ ID NO: 2630 - DNA, 25 bp, Artificial
  primer
gtgatgtcactcacctagacaacca

SEQ ID NO: 2631 - DNA, 25 bp, Artificial
  primer
ctcacctagacaaccagaggctggc

SEQ ID NO: 2632 - DNA, 25 bp, Artificial
  primer
ccagaggctggcattgaggctaacc

SEQ ID NO: 2633 - DNA, 25 bp, Artificial
  primer
ggcattgaggctaacctccaacaca

SEQ ID NO: 2634 - DNA, 25 bp, Artificial
  primer
taacctccaacacagtgcatctcag

SEQ ID NO: 2635 - DNA, 25 bp, Artificial
  primer
tgcatctcagatgcctcagtaggca

SEQ ID NO: 2636 - DNA, 25 bp, Artificial
  primer
cacagtcctctccgattatgtgggc

SEQ ID NO: 2637 - DNA, 25 bp, Artificial
  primer
caccgctatgtctggctggtttacg

SEQ ID NO: 2638 - DNA, 25 bp, Artificial
  primer
ggccgctaaagtgtgacgagcccat

SEQ ID NO: 2639 - DNA, 25 bp, Artificial
  primer
ccatcctcagcaaccgatctggaga

SEQ ID NO: 2640 - DNA, 25 bp, Artificial
  primer
caaattcaaggtggcgtccttccgt

SEQ ID NO: 2641 - DNA, 25 bp, Artificial
  primer
ctggcacgtgttaccaggccgagtg

SEQ ID NO: 2642 - DNA, 25 bp, Artificial
  primer
ggatgactatgtgcccaaactgtac

SEQ ID NO: 2643 - DNA, 25 bp, Artificial
  primer
tggggacctgaactgtcctggaggc

SEQ ID NO: 2644 - DNA, 25 bp, Artificial
  primer
ttccccagttcagtgttgcatgtat

SEQ ID NO: 2645 - DNA, 25 bp, Artificial
  primer
ccccccttggcatgggtgagacctg

SEQ ID NO: 2646 - DNA, 25 bp, Artificial
  primer
cctgctgcctggcctttataatttt

SEQ ID NO: 2647 - DNA, 25 bp, Artificial
  primer
ggggctgaggccacacagataggag

SEQ ID NO: 2648 - DNA, 25 bp, Artificial
  primer
gaatgtcctgatggccatgagcagt

SEQ ID NO: 2649 - DNA, 25 bp, Artificial
  primer
catgagcagttgagtggcacagcct

SEQ ID NO: 2650 - DNA, 25 bp, Artificial
  primer
ggcaccaggagcaggtccttgtaat

SEQ ID NO: 2651 - DNA, 25 bp, Artificial
  primer
agttagtgtccagtcagctgagctc

SEQ ID NO: 2652 - DNA, 25 bp, Artificial
  primer
cagtggtgagtgttcatcggcctgt

SEQ ID NO: 2653 - DNA, 25 bp, Artificial
  primer
atcggcctgttaccgttagtacctg

SEQ ID NO: 2654 - DNA, 25 bp, Artificial
  primer
accaggccatcctgtcaaacgagcc

SEQ ID NO: 2655 - DNA, 25 bp, Artificial
  primer
gatctgtctatgggaccagtggctt

SEQ ID NO: 2656 - DNA, 25 bp, Artificial
  primer
tctgccacacccataaatccttgtg

SEQ ID NO: 2657 - DNA, 25 bp, Artificial
  primer
ttgtgtgttaacttctagctgcctg

SEQ ID NO: 2658 - DNA, 25 bp, Artificial
  primer
gaaaacgttcgtcaacatcacgcca

SEQ ID NO: 2659 - DNA, 25 bp, Artificial
  primer
atcacgccagctgaggtgggtgtcc

SEQ ID NO: 2660 - DNA, 25 bp, Artificial
  primer
tcctggttggcaaagaccggtcaag

SEQ ID NO: 2661 - DNA, 25 bp, Artificial
  primer
gaccggtcaagtttttacgtgaatg

SEQ ID NO: 2662 - DNA, 25 bp, Artificial
  primer
aatgttcggtgatccgggactcact

SEQ ID NO: 2663 - DNA, 25 bp, Artificial
  primer
gaatttagcatggatcttcgtacca

SEQ ID NO: 2664 - DNA, 25 bp, Artificial
  primer
ttcgtaccaagagcaccggtggggc

SEQ ID NO: 2665 - DNA, 25 bp, Artificial
  primer
accttcaatgtcactgtcaccaaga

SEQ ID NO: 2666 - DNA, 25 bp, Artificial
  primer
ctgacaagacgctagtcctgctgat

SEQ ID NO: 2667 - DNA, 25 bp, Artificial
  primer
gtgtccacggtggtttgatcaacaa

SEQ ID NO: 2668 - DNA, 25 bp, Artificial
  primer
cccttattgctgccaaaaccacatg

SEQ ID NO: 2669 - DNA, 25 bp, Artificial
  primer
cttactcttcaccagagcctagcaa

SEQ ID NO: 2670 - DNA, 25 bp, Artificial
  primer
tgagctgctcacgtataatgcgcct

SEQ ID NO: 2671 - DNA, 25 bp, Artificial
  primer
gtaacttgggcagacttctactggg

SEQ ID NO: 2672 - DNA, 25 bp, Artificial
  primer
ggagatttgcagtaccacacttttg

SEQ ID NO: 2673 - DNA, 25 bp, Artificial
  primer
agcctgacctgttagacaaccatcc

SEQ ID NO: 2674 - DNA, 25 bp, Artificial
  primer
ccatccaaggctggtgactttacgg

SEQ ID NO: 2675 - DNA, 25 bp, Artificial
  primer
ttcctgccgtcgctaactggataaa

SEQ ID NO: 2676 - DNA, 25 bp, Artificial
  primer
caaaccaaactctagctgatccatg

SEQ ID NO: 2677 - DNA, 25 bp, Artificial
  primer
gatccatgttgccttcaagtttgtt

SEQ ID NO: 2678 - DNA, 25 bp, Artificial
  primer
tcagcctgccagataatccacatgc

SEQ ID NO: 2679 - DNA, 25 bp, Artificial
  primer
cccagctccactaagattttcactt

SEQ ID NO: 2680 - DNA, 25 bp, Artificial
  primer
gagaacccgctggtttattgcgacg

SEQ ID NO: 2681 - DNA, 25 bp, Artificial
  primer
cgcggtgcatcaagcttgctatggc

SEQ ID NO: 2682 - DNA, 25 bp, Artificial
  primer
atggcattgttcaagtacccactgg

SEQ ID NO: 2683 - DNA, 25 bp, Artificial
  primer
gtacccactggaccgtggttttgca

SEQ ID NO: 2684 - DNA, 25 bp, Artificial
  primer
gagagagcagccagagtggcacccc

SEQ ID NO: 2685 - DNA, 25 bp, Artificial
  primer
cctatcctgctactacaccaacagg

SEQ ID NO: 2686 - DNA, 25 bp, Artificial
  primer
gtgttcctgtaatgacgcaaccaac

SEQ ID NO: 2687 - DNA, 25 bp, Artificial
  primer
cccctttggccctgtatcaggagca

SEQ ID NO: 2688 - DNA, 25 bp, Artificial
  primer
agcagcaaaatccttacttccagca

SEQ ID NO: 2689 - DNA, 25 bp, Artificial
  primer
caaactgctgtctcttaaatctctt

SEQ ID NO: 2690 - DNA, 25 bp, Artificial
  primer
aaactctcttcttccattaaaatgt

SEQ ID NO: 2691 - DNA, 25 bp, Artificial
  primer
tgtatctactttcttatgtcttgtt

SEQ ID NO: 2692 - DNA, 25 bp, Artificial
  primer
tactttcttatgtcttgtttctcct

SEQ ID NO: 2693 - DNA, 25 bp, Artificial
  primer
atttttgttctgtatggagcaccac

SEQ ID NO: 2694 - DNA, 25 bp, Artificial
  primer
ggagcaccactgatagagttggcat

SEQ ID NO: 2695 - DNA, 25 bp, Artificial
  primer
gtgccttgcttatgtttgttaggac

SEQ ID NO: 2696 - DNA, 25 bp, Artificial
  primer
tttgttaggaccaaacctcaaagca

SEQ ID NO: 2697 - DNA, 25 bp, Artificial
  primer
gagaatagtctccagatcactacaa

SEQ ID NO: 2698 - DNA, 25 bp, Artificial
  primer
cagatcactacaatttctagctttg

SEQ ID NO: 2699 - DNA, 25 bp, Artificial
  primer
aggagcatggcttggagcacttcct

SEQ ID NO: 2700 - DNA, 25 bp, Artificial
  primer
gcacttcctattccactggattggg

SEQ ID NO: 2701 - DNA, 25 bp, Artificial
  primer
aagaccatggcaggtatggcccatc

SEQ ID NO: 2702 - DNA, 25 bp, Artificial
  primer
tttgttgccaccactgagagcacca

SEQ ID NO: 2703 - DNA, 25 bp, Artificial
  primer
cccccaggaagcctagacggtgtcg

SEQ ID NO: 2704 - DNA, 25 bp, Artificial
  primer
cacccatgacaatcaccttcagaat

SEQ ID NO: 2705 - DNA, 25 bp, Artificial
  primer
cagaatcatgtcgatcctgggggcc

SEQ ID NO: 2706 - DNA, 25 bp, Artificial
  primer
gctctaacacctgcctaggtttttc

SEQ ID NO: 2707 - DNA, 25 bp, Artificial
  primer
ttcctactgtcctcagaggcgtgct

SEQ ID NO: 2708 - DNA, 25 bp, Artificial
  primer
tcaaagcctggcctaattgttccta

SEQ ID NO: 2709 - DNA, 25 bp, Artificial
  primer
catgaggaggtcccacttgcaactt

SEQ ID NO: 2710 - DNA, 25 bp, Artificial
  primer
ggtcctcatgggtcccttgaaggaa

SEQ ID NO: 2711 - DNA, 25 bp, Artificial
  primer
agaaaggagagacgtgcagcgcccc

SEQ ID NO: 2712 - DNA, 25 bp, Artificial
  primer
ccctctgcacccttatcatgggatg

SEQ ID NO: 2713 - DNA, 25 bp, Artificial
  primer
cagcatgccctacaacgtgatctgc

SEQ ID NO: 2714 - DNA, 25 bp, Artificial
  primer
acaacgtgatctgcctcacgtgcac

SEQ ID NO: 2715 - DNA, 25 bp, Artificial
  primer
actgtggtggccgtgtgctacggct

SEQ ID NO: 2716 - DNA, 25 bp, Artificial
  primer
tggccaagcggctggccaaccttat

SEQ ID NO: 2717 - DNA, 25 bp, Artificial
  primer
ctctcctcagagttggcttttgaac

SEQ ID NO: 2718 - DNA, 25 bp, Artificial
  primer
ggcttttgaaccaaagtgccctgga

SEQ ID NO: 2719 - DNA, 25 bp, Artificial
  primer
tccagtacaggagccacgagccaaa

SEQ ID NO: 2720 - DNA, 25 bp, Artificial
  primer
cctgtagtggccacctctatattga

SEQ ID NO: 2721 - DNA, 25 bp, Artificial
  primer
aaaagtggtcggtggctgctgtatt

SEQ ID NO: 2722 - DNA, 25 bp, Artificial
  primer
agaaaggtcggctggcagcactggc

SEQ ID NO: 2723 - DNA, 25 bp, Artificial
  primer
ggtgatggggtgtgctacacagtgt

SEQ ID NO: 2724 - DNA, 25 bp, Artificial
  primer
aagcagatgttatggaagcaagttc

SEQ ID NO: 2725 - DNA, 25 bp, Artificial
  primer
ggaagcaagttcacaattacccaat

SEQ ID NO: 2726 - DNA, 25 bp, Artificial
  primer
attacccaatgttcaacctccttat

SEQ ID NO: 2727 - DNA, 25 bp, Artificial
  primer
aatgttcaacctccttatggatatt

SEQ ID NO: 2728 - DNA, 25 bp, Artificial
  primer
tgcatgtgtgaatcagactgctgta

SEQ ID NO: 2729 - DNA, 25 bp, Artificial
  primer
cagactgctgtatatgaggagcttg

SEQ ID NO: 2730 - DNA, 25 bp, Artificial
  primer
gaaacacgaagactctgtgatgtca

SEQ ID NO: 2731 - DNA, 25 bp, Artificial
  primer
tgtgatgtcagaccttttcttccag

SEQ ID NO: 2732 - DNA, 25 bp, Artificial
  primer
ttcttccagttctcaaattagtgac

SEQ ID NO: 2733 - DNA, 25 bp, Artificial
  primer
gacaagaagttgtgacccaggggaa

SEQ ID NO: 2734 - DNA, 25 bp, Artificial
  primer
ctcaaaaattggagtccttatagga

SEQ ID NO: 2735 - DNA, 25 bp, Artificial
  primer
actcgcacaccaaccttatatttgg

SEQ ID NO: 2736 - DNA, 25 bp, Artificial
  primer
ggacttcaaattggacccaggagcc

SEQ ID NO: 2737 - DNA, 25 bp, Artificial
  primer
ggacaagcttcatttacacgatatc

SEQ ID NO: 2738 - DNA, 25 bp, Artificial
  primer
ggagatgtgtatattgggcccgatg

SEQ ID NO: 2739 - DNA, 25 bp, Artificial
  primer
attgggcccgatgatgcacaacaaa

SEQ ID NO: 2740 - DNA, 25 bp, Artificial
  primer
ctcatcacacagcagtgcttggaga

SEQ ID NO: 2741 - DNA, 25 bp, Artificial
  primer
gaagccactttgtcttaattgctgg

SEQ ID NO: 2742 - DNA, 25 bp, Artificial
  primer
gagaaccagttatccaacatggtcc

SEQ ID NO: 2743 - DNA, 25 bp, Artificial
  primer
cggaagagcaggtcttgatgtgtcc

SEQ ID NO: 2744 - DNA, 25 bp, Artificial
  primer
gaaggcattccatttctaaagctta

SEQ ID NO: 2745 - DNA, 25 bp, Artificial
  primer
gcttctaaagaattccacactaacg

SEQ ID NO: 2746 - DNA, 25 bp, Artificial
  primer
ggcaaatctttaagtctgttccctt

SEQ ID NO: 2747 - DNA, 25 bp, Artificial
  primer
tctgttcccttctaattctgtatca

SEQ ID NO: 2748 - DNA, 25 bp, Artificial
  primer
acattgcttttggcggccgcgaatt

SEQ ID NO: 2749 - DNA, 25 bp, Artificial
  primer
gctcgcccgccagaagaatatgaaa

SEQ ID NO: 2750 - DNA, 25 bp, Artificial
  primer
aagcgccgagatgacgggctttctg

SEQ ID NO: 2751 - DNA, 25 bp, Artificial
  primer
ccgcccgcaagcagagggactcgga

SEQ ID NO: 2752 - DNA, 25 bp, Artificial
  primer
gggactcggagatcatgcagcagaa

SEQ ID NO: 2753 - DNA, 25 bp, Artificial
  primer
ggaacccaagtagctttgtggcttc

SEQ ID NO: 2754 - DNA, 25 bp, Artificial
  primer
tcctcctgtagtgctcacaggtccc

SEQ ID NO: 2755 - DNA, 25 bp, Artificial
  primer
cttcccagtgttttttattcctgtg

SEQ ID NO: 2756 - DNA, 25 bp, Artificial
  primer
ttattcctgtggggctcaccccaaa

SEQ ID NO: 2757 - DNA, 25 bp, Artificial
  primer
ggtggctctcttccaataacatcac

SEQ ID NO: 2758 - DNA, 25 bp, Artificial
  primer
gctctcttccaataacatcacttga

SEQ ID NO: 2759 - DNA, 25 bp, Artificial
  primer
catcacttgatgcaactgggaacct

SEQ ID NO: 2760 - DNA, 25 bp, Artificial
  primer
gcaactgggaacctggtatttgcca

SEQ ID NO: 2761 - DNA, 25 bp, Artificial
  primer
tatttgccaatgcgggaggagcccc

SEQ ID NO: 2762 - DNA, 25 bp, Artificial
  primer
tgcagggaactctgcacctgtagcc

SEQ ID NO: 2763 - DNA, 25 bp, Artificial
  primer
gcctccaaggcacagtgagctgggc

SEQ ID NO: 2764 - DNA, 25 bp, Artificial
  primer
gcctttttcactctgcagtgtgatt

SEQ ID NO: 2765 - DNA, 25 bp, Artificial
  primer
tgtgattggactgccagccaggtta

SEQ ID NO: 2766 - DNA, 25 bp, Artificial
  primer
ttcctctcgccgtgttgtgagggca

SEQ ID NO: 2767 - DNA, 25 bp, Artificial
  primer
tggagacggaacatttgcctaattt

SEQ ID NO: 2768 - DNA, 25 bp, Artificial
  primer
aaaccaagttattgctatcaaggaa

SEQ ID NO: 2769 - DNA, 25 bp, Artificial
  primer
taatcttcagtctcgacacacagct

SEQ ID NO: 2770 - DNA, 25 bp, Artificial
  primer
gtctcgacacacagcttttataggt

SEQ ID NO: 2771 - DNA, 25 bp, Artificial
  primer
aaattgttcagggctcttagagatg

SEQ ID NO: 2772 - DNA, 25 bp, Artificial
  primer
aaaccatggctttcatatggacaga

SEQ ID NO: 2773 - DNA, 25 bp, Artificial
  primer
aaggcagtggtgtgtaggcaaatat

SEQ ID NO: 2774 - DNA, 25 bp, Artificial
  primer
aaatatggtttggcattcgtctttt

SEQ ID NO: 2775 - DNA, 25 bp, Artificial
  primer
ggcattcgtcttttaatgacacctg

SEQ ID NO: 2776 - DNA, 25 bp, Artificial
  primer
tacatgggggcctgaatgtcagcca

SEQ ID NO: 2777 - DNA, 25 bp, Artificial
  primer
gaatggtcatgctttggagatcaaa

SEQ ID NO: 2778 - DNA, 25 bp, Artificial
  primer
tgaatgcctatgtatgtcaggccct

SEQ ID NO: 2779 - DNA, 25 bp, Artificial
  primer
atggagatggtactggagtcgccag

SEQ ID NO: 2780 - DNA, 25 bp, Artificial
  primer
tcgccagtatttaccgggggccatt

SEQ ID NO: 2781 - DNA, 25 bp, Artificial
  primer
tttaaacttagacactcagctccag

SEQ ID NO: 2782 - DNA, 25 bp, Artificial
  primer
gctttccatggcgaacagtggtcca

SEQ ID NO: 2783 - DNA, 25 bp, Artificial
  primer
atcacctgctctaagtgcgattggc

SEQ ID NO: 2784 - DNA, 25 bp, Artificial
  primer
aaaatcatcgatggacttctagtga

SEQ ID NO: 2785 - DNA, 25 bp, Artificial
  primer
ttcccacaggccccaacaataagcc

SEQ ID NO: 2786 - DNA, 25 bp, Artificial
  primer
ctacctgtggtgatctcgcagtgtg

SEQ ID NO: 2787 - DNA, 25 bp, Artificial
  primer
aaagactgaatcaggccttcccttc

SEQ ID NO: 2788 - DNA, 25 bp, Artificial
  primer
agtaagataatctggactggccccc

SEQ ID NO: 2789 - DNA, 25 bp, Artificial
  primer
ctgctgccccatttgatcaagagac

SEQ ID NO: 2790 - DNA, 25 bp, Artificial
  primer
attgactttgcagcagggtggcagg

SEQ ID NO: 2791 - DNA, 25 bp, Artificial
  primer
gtcctgcctagctcagatttcatgg

SEQ ID NO: 2792 - DNA, 25 bp, Artificial
  primer
cagatttcatggcacctgcacttga

SEQ ID NO: 2793 - DNA, 25 bp, Artificial
  primer
cacttctttatcacaggtgtcttga

SEQ ID NO: 2794 - DNA, 25 bp, Artificial
  primer
tagcttcttttaccaacctgagaaa

SEQ ID NO: 2795 - DNA, 25 bp, Artificial
  primer
gtatcttgctgtgtgtagtctcttg

SEQ ID NO: 2796 - DNA, 25 bp, Artificial
  primer
tcacacctttcttcactgagattcc

SEQ ID NO: 2797 - DNA, 25 bp, Artificial
  primer
tccagttcttcaagccataaatgac

SEQ ID NO: 2798 - DNA, 25 bp, Artificial
  primer
gattatttgactggaatgcttctta

SEQ ID NO: 2799 - DNA, 25 bp, Artificial
  primer
gaataactatactccgttatccacc

SEQ ID NO: 2800 - DNA, 25 bp, Artificial
  primer
tatccacccgatttcctaatgtaat

SEQ ID NO: 2801 - DNA, 25 bp, Artificial
  primer
gtttgacagtgtgccattcgacaac

SEQ ID NO: 2802 - DNA, 25 bp, Artificial
  primer
gattcatcactgtggtgttctccat

SEQ ID NO: 2803 - DNA, 25 bp, Artificial
  primer
ctccatgtctgctagccatttaggt

SEQ ID NO: 2804 - DNA, 25 bp, Artificial
  primer
cttcttgcaccatcttgcctaatgg

SEQ ID NO: 2805 - DNA, 25 bp, Artificial
  primer
aacattgatttactccactttttat

SEQ ID NO: 2806 - DNA, 25 bp, Artificial
  primer
tatgccttccattgtgatgacgtca

SEQ ID NO: 2807 - DNA, 25 bp, Artificial
  primer
aagccttcagtcatgctatgggatt

SEQ ID NO: 2808 - DNA, 25 bp, Artificial
  primer
gtgtatcctcattactgtatcattt

SEQ ID NO: 2809 - DNA, 25 bp, Artificial
  primer
tgtatcatttgtggggtacacccct

SEQ ID NO: 2810 - DNA, 25 bp, Artificial
  primer
ttactgtggcttgtagcattcctcc

SEQ ID NO: 2811 - DNA, 25 bp, Artificial
  primer
ctccacccggtcttggtggtggtat

SEQ ID NO: 2812 - DNA, 25 bp, Artificial
  primer
tagagttaactacctgcttaggccc

SEQ ID NO: 2813 - DNA, 25 bp, Artificial
  primer
gcttaggccccagaacattacttat

SEQ ID NO: 2814 - DNA, 25 bp, Artificial
  primer
agaacattacttatgcccttcagtt

SEQ ID NO: 2815 - DNA, 25 bp, Artificial
  primer
tgtgcaaggttttgtaccctggtaa

SEQ ID NO: 2816 - DNA, 25 bp, Artificial
  primer
agtttgttttctgtggtgtttgtca

SEQ ID NO: 2817 - DNA, 25 bp, Artificial
  primer
aattaactgtctgtaacatgctgtt

SEQ ID NO: 2818 - DNA, 25 bp, Artificial
  primer
ctgtctgtctttctttaggttagct

SEQ ID NO: 2819 - DNA, 25 bp, Artificial
  primer
acacttgtctgtcttgcaatgtaga

SEQ ID NO: 2820 - DNA, 25 bp, Artificial
  primer
gaagcagctttgtagcaccttgttt

SEQ ID NO: 2821 - DNA, 25 bp, Artificial
  primer
tgctgcatttgttgctgcactttgt

SEQ ID NO: 2822 - DNA, 25 bp, Artificial
  primer
gcactttgtgcattctgaacatgaa

SEQ ID NO: 2823 - DNA, 25 bp, Artificial
  primer
aatggtggtcattggccgacatcac

SEQ ID NO: 2824 - DNA, 25 bp, Artificial
  primer
ccgacatcacagttttcctgtttcc

SEQ ID NO: 2825 - DNA, 25 bp, Artificial
  primer
ctacagctaaccctcacaagcatga

SEQ ID NO: 2826 - DNA, 25 bp, Artificial
  primer
agcatgaagtgctgtggctgttcct

SEQ ID NO: 2827 - DNA, 25 bp, Artificial
  primer
ggctgttccttatcctaatgatgcg

SEQ ID NO: 2828 - DNA, 25 bp, Artificial
  primer
ctaatgatgcgcttttgtcccgtaa

SEQ ID NO: 2829 - DNA, 25 bp, Artificial
  primer
gcaaggaaagctcacgaaccccaaa

SEQ ID NO: 2830 - DNA, 25 bp, Artificial
  primer
ctgcagcccatggtgagctctggga

SEQ ID NO: 2831 - DNA, 25 bp, Artificial
  primer
ggtcactccttttttgcatgtgcaa

SEQ ID NO: 2832 - DNA, 25 bp, Artificial
  primer
aaagtggcatttcctggtcagtggt

SEQ ID NO: 2833 - DNA, 25 bp, Artificial
  primer
aagacgacagctctgtatctgccat

SEQ ID NO: 2834 - DNA, 25 bp, Artificial
  primer
accggatctgctctgaccgcacttg

SEQ ID NO: 2835 - DNA, 25 bp, Artificial
  primer
gctctgaccgcacttgaaggctggg

SEQ ID NO: 2836 - DNA, 25 bp, Artificial
  primer
tgtgccggccattcgttttctctct

SEQ ID NO: 2837 - DNA, 25 bp, Artificial
  primer
tgccggccattcgttttctctctct

SEQ ID NO: 2838 - DNA, 25 bp, Artificial
  primer
caccctcgaggcagggaaaagccat

SEQ ID NO: 2839 - DNA, 25 bp, Artificial
  primer
ccagttgaaagacacccagtgcaca

SEQ ID NO: 2840 - DNA, 25 bp, Artificial
  primer
acatctgggccgtggactatctgat

SEQ ID NO: 2841 - DNA, 25 bp, Artificial
  primer
cgtggactatctgatcttggtcctg

SEQ ID NO: 2842 - DNA, 25 bp, Artificial
  primer
ctatctgatcttggtcctggccgag

SEQ ID NO: 2843 - DNA, 25 bp, Artificial
  primer
cagcccggagtaaggttcagaaagt

SEQ ID NO: 2844 - DNA, 25 bp, Artificial
  primer
cgagaaacccagttctcctgggcca

SEQ ID NO: 2845 - DNA, 25 bp, Artificial
  primer
tcctgggccaaggatcccttctggc

SEQ ID NO: 2846 - DNA, 25 bp, Artificial
  primer
ttctggcaaagctgctgctccgccg

SEQ ID NO: 2847 - DNA, 25 bp, Artificial
  primer
gcaaagctgctgctccgccgcttgg

SEQ ID NO: 2848 - DNA, 25 bp, Artificial
  primer
caaagctgctgctccgccgcttggt

SEQ ID NO: 2849 - DNA, 25 bp, Artificial
  primer
gtaagggctcccaggtcttcatctg

SEQ ID NO: 2850 - DNA, 25 bp, Artificial
  primer
ggagggtaccagatgacagattcac

SEQ ID NO: 2851 - DNA, 25 bp, Artificial
  primer
acagattcacccaacactcatctga

SEQ ID NO: 2852 - DNA, 25 bp, Artificial
  primer
aactgctggaccatggttgggttag

SEQ ID NO: 2853 - DNA, 25 bp, Artificial
  primer
tgattaggtttatcccggcctttca

SEQ ID NO: 2854 - DNA, 25 bp, Artificial
  primer
cccggcctttcagattctaggggct

SEQ ID NO: 2855 - DNA, 25 bp, Artificial
  primer
gattctaggggctgtttccatggag

SEQ ID NO: 2856 - DNA, 25 bp, Artificial
  primer
atggggcaacagtctgcttgctttc

SEQ ID NO: 2857 - DNA, 25 bp, Artificial
  primer
gaagggttaacctagagccagacgt

SEQ ID NO: 2858 - DNA, 25 bp, Artificial
  primer
gagccagacgtaacttctacagaat

SEQ ID NO: 2859 - DNA, 25 bp, Artificial
  primer
aactggacactgagcatgacgtacc

SEQ ID NO: 2860 - DNA, 25 bp, Artificial
  primer
atgacgtaccatcttccactaagat

SEQ ID NO: 2861 - DNA, 25 bp, Artificial
  primer
gcctctactactttgagtacaccac

SEQ ID NO: 2862 - DNA, 25 bp, Artificial
  primer
ggacaaggagccccgaggaatcatc

SEQ ID NO: 2863 - DNA, 25 bp, Artificial
  primer
gaatcatccccctggagaatctgag

SEQ ID NO: 2864 - DNA, 25 bp, Artificial
  primer
gaatctgagcatccgagaggtggac

SEQ ID NO: 2865 - DNA, 25 bp, Artificial
  primer
ctgctttgaactttacatccccaac

SEQ ID NO: 2866 - DNA, 25 bp, Artificial
  primer
acaaggggcagctcatcaaagcctg

SEQ ID NO: 2867 - DNA, 25 bp, Artificial
  primer
gagggaaaccacatggtgtaccgga

SEQ ID NO: 2868 - DNA, 25 bp, Artificial
  primer
gagtggatcaagtccatccaggcgg

SEQ ID NO: 2869 - DNA, 25 bp, Artificial
  primer
tccatccaggcggctgtgagtgtgg

SEQ ID NO: 2870 - DNA, 25 bp, Artificial
  primer
ccattatttattacggagctgcccc

SEQ ID NO: 2871 - DNA, 25 bp, Artificial
  primer
aacacgctgttggtaatcttattaa

SEQ ID NO: 2872 - DNA, 25 bp, Artificial
  primer
ggctttcagctctatcagagtgacc

SEQ ID NO: 2873 - DNA, 25 bp, Artificial
  primer
agagtgaccctagtggaaattacgg

SEQ ID NO: 2874 - DNA, 25 bp, Artificial
  primer
gggggatggaaggccacatgcattg

SEQ ID NO: 2875 - DNA, 25 bp, Artificial
  primer
gaaataatagcgctgcagctgtgtc

SEQ ID NO: 2876 - DNA, 25 bp, Artificial
  primer
gcgctgcagctgtgtcaatgttgaa

SEQ ID NO: 2877 - DNA, 25 bp, Artificial
  primer
gaaatgaccttgaagtcagcacttg

SEQ ID NO: 2878 - DNA, 25 bp, Artificial
  primer
catggatgttagtaaactctctgct

SEQ ID NO: 2879 - DNA, 25 bp, Artificial
  primer
aagacagtaatcagagttctcaaac

SEQ ID NO: 2880 - DNA, 25 bp, Artificial
  primer
tactgaattgggtccttgtcatttc

SEQ ID NO: 2881 - DNA, 25 bp, Artificial
  primer
gtccttgtcatttctgtccaattga

SEQ ID NO: 2882 - DNA, 25 bp, Artificial
  primer
tacccttcatggacgtcttaatctt

SEQ ID NO: 2883 - DNA, 25 bp, Artificial
  primer
caagctgtgtccaatctggctttgc

SEQ ID NO: 2884 - DNA, 25 bp, Artificial
  primer
atgtctcgtccctttggagtagcat

SEQ ID NO: 2885 - DNA, 25 bp, Artificial
  primer
aaaggaccccagctgtttcatatgg

SEQ ID NO: 2886 - DNA, 25 bp, Artificial
  primer
tggacccatctgggacctttgtaca

SEQ ID NO: 2887 - DNA, 25 bp, Artificial
  primer
gctcgagcaattggctctgcttcag

SEQ ID NO: 2888 - DNA, 25 bp, Artificial
  primer
ctgcttcagagggtgcccagagctc

SEQ ID NO: 2889 - DNA, 25 bp, Artificial
  primer
gagctccttgcaagaactttaccac

SEQ ID NO: 2890 - DNA, 25 bp, Artificial
  primer
gaagccatcaagtcttcactcatca

SEQ ID NO: 2891 - DNA, 25 bp, Artificial
  primer
attgagctagccacagtgcagcctg

SEQ ID NO: 2892 - DNA, 25 bp, Artificial
  primer
aggaatcctgatcctcagaacttct

SEQ ID NO: 2893 - DNA, 25 bp, Artificial
  primer
taaattttatttccagctcctgttc

SEQ ID NO: 2894 - DNA, 25 bp, Artificial
  primer
ccagagccaccggctgactgtagag

SEQ ID NO: 2895 - DNA, 25 bp, Artificial
  primer
ggacccggtcactgtggagtacatc

SEQ ID NO: 2896 - DNA, 25 bp, Artificial
  primer
cgctacatcgccagtctgaagcagc

SEQ ID NO: 2897 - DNA, 25 bp, Artificial
  primer
cagagcaatgggcgcaggccgtttg

SEQ ID NO: 2898 - DNA, 25 bp, Artificial
  primer
ccctcatcgtgggtttcgactttga

SEQ ID NO: 2899 - DNA, 25 bp, Artificial
  primer
ttcgactttgatggcactcctaggc

SEQ ID NO: 2900 - DNA, 25 bp, Artificial
  primer
gggcacataccatgcctggaaggcc

SEQ ID NO: 2901 - DNA, 25 bp, Artificial
  primer
ataggccggggtgccaagtcagtgc

SEQ ID NO: 2902 - DNA, 25 bp, Artificial
  primer
aagctggtgatcaaggcactcctgg

SEQ ID NO: 2903 - DNA, 25 bp, Artificial
  primer
gaacttgctgtcatgaggcgagatc

SEQ ID NO: 2904 - DNA, 25 bp, Artificial
  primer
atgagtctcgatgtgtaggcctttc

SEQ ID NO: 2905 - DNA, 25 bp, Artificial
  primer
taacttcacacgccgaaacctggct

SEQ ID NO: 2906 - DNA, 25 bp, Artificial
  primer
cgaaacctggctgactgtcttcgga

SEQ ID NO: 2907 - DNA, 25 bp, Artificial
  primer
gggccagcgctgtattacatggact

SEQ ID NO: 2908 - DNA, 25 bp, Artificial
  primer
actctcagtatcctcgaccgatact

SEQ ID NO: 2909 - DNA, 25 bp, Artificial
  primer
tacacaccgactatctcacgtgaga

SEQ ID NO: 2910 - DNA, 25 bp, Artificial
  primer
gtgagagggcagtggaactccttag

SEQ ID NO: 2911 - DNA, 25 bp, Artificial
  primer
gctccagaaacgcttcatcctgaat

SEQ ID NO: 2912 - DNA, 25 bp, Artificial
  primer
tgaatctgccaaccttcagtgttcg

SEQ ID NO: 2913 - DNA, 25 bp, Artificial
  primer
tgacctggataacatttccttcccc

SEQ ID NO: 2914 - DNA, 25 bp, Artificial
  primer
aacagggctcctaacatcatgtcct

SEQ ID NO: 2915 - DNA, 25 bp, Artificial
  primer
tcttttcaggcgcactcttgataaa

SEQ ID NO: 2916 - DNA, 25 bp, Artificial
  primer
gatatccacaacatgtctgtcaagg

SEQ ID NO: 2917 - DNA, 25 bp, Artificial
  primer
tctgtcaaggccatgaggtttcctc

SEQ ID NO: 2918 - DNA, 25 bp, Artificial
  primer
gtttcctcccaaatcgtacaacaag

SEQ ID NO: 2919 - DNA, 25 bp, Artificial
  primer
ggaacggcgtgagcgagaacagcag

SEQ ID NO: 2920 - DNA, 25 bp, Artificial
  primer
gaacagcaggacttggagtttgcca

SEQ ID NO: 2921 - DNA, 25 bp, Artificial
  primer
tttcccacacacagctcatatgctg

SEQ ID NO: 2922 - DNA, 25 bp, Artificial
  primer
acagctcatatgctgcattcgtgca

SEQ ID NO: 2923 - DNA, 25 bp, Artificial
  primer
tgctgcattcgtgcagggggtgggg

SEQ ID NO: 2924 - DNA, 25 bp, Artificial
  primer
cccagccggtgacttactgtacagc

SEQ ID NO: 2925 - DNA, 25 bp, Artificial
  primer
gatagttctgtgtactcctttaggg

SEQ ID NO: 2926 - DNA, 25 bp, Artificial
  primer
ttagggagtgggggactagaactgg

SEQ ID NO: 2927 - DNA, 25 bp, Artificial
  primer
tgtggagttcggctctgtgaacacc

SEQ ID NO: 2928 - DNA, 25 bp, Artificial
  primer
cccagaacttccagtcactgcataa

SEQ ID NO: 2929 - DNA, 25 bp, Artificial
  primer
gaatgtgacagtgatccgcaggggg

SEQ ID NO: 2930 - DNA, 25 bp, Artificial
  primer
ccagcttagacttgttccaacacgc

SEQ ID NO: 2931 - DNA, 25 bp, Artificial
  primer
aaaaggactgctgggctgcaacatt

SEQ ID NO: 2932 - DNA, 25 bp, Artificial
  primer
gggtctagggatttccaacttgtct

SEQ ID NO: 2933 - DNA, 25 bp, Artificial
  primer
agaggcttgtaacctgaacttctgt

SEQ ID NO: 2934 - DNA, 25 bp, Artificial
  primer
gtgtggtggcagtactgtggcccac

SEQ ID NO: 2935 - DNA, 25 bp, Artificial
  primer
cccaccagtgtaatctccctggatt

SEQ ID NO: 2936 - DNA, 25 bp, Artificial
  primer
tctttcacaaattaggccacggccc

SEQ ID NO: 2937 - DNA, 25 bp, Artificial
  primer
gtgggcggaagttattctggcaggt

SEQ ID NO: 2938 - DNA, 25 bp, Artificial
  primer
atgtggctgaagttacccgaagttc

SEQ ID NO: 2939 - DNA, 25 bp, Artificial
  primer
gttacccgaagttcagcttgcagtg

SEQ ID NO: 2940 - DNA, 25 bp, Artificial
  primer
agttcagcttgcagtgtaattcaga

SEQ ID NO: 2941 - DNA, 25 bp, Artificial
  primer
gaatcatacttcctttcaggtcaaa

SEQ ID NO: 2942 - DNA, 25 bp, Artificial
  primer
gtgggaaatatcctgttcgtgacct

SEQ ID NO: 2943 - DNA, 25 bp, Artificial
  primer
tcctgttcgtgacctaggagaaaca

SEQ ID NO: 2944 - DNA, 25 bp, Artificial
  primer
ttcttactccatacaagcagtttat

SEQ ID NO: 2945 - DNA, 25 bp, Artificial
  primer
aaacatgctacaggggcacattttc

SEQ ID NO: 2946 - DNA, 25 bp, Artificial
  primer
acaggggcacattttctgtggttaa

SEQ ID NO: 2947 - DNA, 25 bp, Artificial
  primer
gcagttttcctttgcattgagggtt

SEQ ID NO: 2948 - DNA, 25 bp, Artificial
  primer
ctttgcattgagggttttggctttt

SEQ ID NO: 2949 - DNA, 25 bp, Artificial
  primer
gtctccgctcctgataatgatgttg

SEQ ID NO: 2950 - DNA, 25 bp, Artificial
  primer
acttcttcttaatagctgttcgcct

SEQ ID NO: 2951 - DNA, 25 bp, Artificial
  primer
ttcgcctggcttcactgaaccagat

SEQ ID NO: 2952 - DNA, 25 bp, Artificial
  primer
tcttggatccttgggtttacctgct

SEQ ID NO: 2953 - DNA, 25 bp, Artificial
  primer
gttttgccagatcaggtaccacaca

SEQ ID NO: 2954 - DNA, 25 bp, Artificial
  primer
acaaacaactatgcatccagctcca

SEQ ID NO: 2955 - DNA, 25 bp, Artificial
  primer
ccagtgttcctcaaccttgatgtgg

SEQ ID NO: 2956 - DNA, 25 bp, Artificial
  primer
taaaacctgcctttctgccaggatc

SEQ ID NO: 2957 - DNA, 25 bp, Artificial
  primer
ggatcacatcactggaagctccatg

SEQ ID NO: 2958 - DNA, 25 bp, Artificial
  primer
gctccatgactctctttttgtaaaa

SEQ ID NO: 2959 - DNA, 25 bp, Artificial
  primer
tcccaaactattctcttttacttct

SEQ ID NO: 2960 - DNA, 25 bp, Artificial
  primer
aaaacttcacatttatgtggcttgt

SEQ ID NO: 2961 - DNA, 25 bp, Artificial
  primer
tgtggcttgtttatccttagctcac

SEQ ID NO: 2962 - DNA, 25 bp, Artificial
  primer
tgtttatccttagctcacagattga

SEQ ID NO: 2963 - DNA, 25 bp, Artificial
  primer
ggtaataatgacactcctagacttt

SEQ ID NO: 2964 - DNA, 25 bp, Artificial
  primer
gacactcctagactttgggatcaaa

SEQ ID NO: 2965 - DNA, 25 bp, Artificial
  primer
taacttagggccaagtcttgggtct

SEQ ID NO: 2966 - DNA, 25 bp, Artificial
  primer
gttcacaacctagggcaagttactc

SEQ ID NO: 2967 - DNA, 25 bp, Artificial
  primer
aagttactctgcctttctaagactc

SEQ ID NO: 2968 - DNA, 25 bp, Artificial
  primer
ctaagactcacttacatcttctgtg

SEQ ID NO: 2969 - DNA, 25 bp, Artificial
  primer
taattgtaccaacctcatagagttt

SEQ ID NO: 2970 - DNA, 25 bp, Artificial
  primer
atgtggactaaatatctgtcatata

SEQ ID NO: 2971 - DNA, 25 bp, Artificial
  primer
agagcagatttccactgcaggcacc

SEQ ID NO: 2972 - DNA, 25 bp, Artificial
  primer
gttcatgctaaatggggccctaact

SEQ ID NO: 2973 - DNA, 25 bp, Artificial
  primer
ggccctaactatcgggaccatggat

SEQ ID NO: 2974 - DNA, 25 bp, Artificial
  primer
agagaacctgttcatctttggcatg

SEQ ID NO: 2975 - DNA, 25 bp, Artificial
  primer
ggatagatgatgtggctgctttgga

SEQ ID NO: 2976 - DNA, 25 bp, Artificial
  primer
gcagcctgacctcttcaaagatatc

SEQ ID NO: 2977 - DNA, 25 bp, Artificial
  primer
gtctttgcagactacgaagcctatg

SEQ ID NO: 2978 - DNA, 25 bp, Artificial
  primer
aaggcctggaacacaatggtactca

SEQ ID NO: 2979 - DNA, 25 bp, Artificial
  primer
ggtactcaaaaacatagctgcctcg

SEQ ID NO: 2980 - DNA, 25 bp, Artificial
  primer
atagctgcctcggggaaattctcca

SEQ ID NO: 2981 - DNA, 25 bp, Artificial
  primer
ggaacgtggaaccttcagatctaaa

SEQ ID NO: 2982 - DNA, 25 bp, Artificial
  primer
gaccttgcccacgtggtagagatct

SEQ ID NO: 2983 - DNA, 25 bp, Artificial
  primer
gatctatgactttgaaccagcgctc

SEQ ID NO: 2984 - DNA, 25 bp, Artificial
  primer
ccagcgctcaagacggaggacctgc

SEQ ID NO: 2985 - DNA, 25 bp, Artificial
  primer
gctggcaacgttttctgagttccaa

SEQ ID NO: 2986 - DNA, 25 bp, Artificial
  primer
ggggttcaggattcagtgggtggat

SEQ ID NO: 2987 - DNA, 25 bp, Artificial
  primer
gtgggtggatgatactcacgcactc

SEQ ID NO: 2988 - DNA, 25 bp, Artificial
  primer
gcagtcaaagctcaaagccttgcag

SEQ ID NO: 2989 - DNA, 25 bp, Artificial
  primer
tgcagaggccaaaactcctgcgtct

SEQ ID NO: 2990 - DNA, 25 bp, Artificial
  primer
aaagaaagagcggcctgctgtccgg

SEQ ID NO: 2991 - DNA, 25 bp, Artificial
  primer
caacaccataagccttcacagacgc

SEQ ID NO: 2992 - DNA, 25 bp, Artificial
  primer
caccctcgagcttcaccatggggtg

SEQ ID NO: 2993 - DNA, 25 bp, Artificial
  primer
acactaggttcttcccagcatatga

SEQ ID NO: 2994 - DNA, 25 bp, Artificial
  primer
agtccccaagtctactctgattgat

SEQ ID NO: 2995 - DNA, 25 bp, Artificial
  primer
tgattgattgtcatgggcacccaca

SEQ ID NO: 2996 - DNA, 25 bp, Artificial
  primer
aatgtgcaaactccttggactccag

SEQ ID NO: 2997 - DNA, 25 bp, Artificial
  primer
tccagacccctgtctggttggcact

SEQ ID NO: 2998 - DNA, 25 bp, Artificial
  primer
gcactcccagcagtgtgtggtttca

SEQ ID NO: 2999 - DNA, 25 bp, Artificial
  primer
aggtgggaagcctccatagcattga

SEQ ID NO: 3000 - DNA, 25 bp, Artificial
  primer
agcattgaaggccagcctgcatctc

SEQ ID NO: 3001 - DNA, 25 bp, Artificial
  primer
cacccatccctttaaagtgattggc

SEQ ID NO: 3002 - DNA, 25 bp, Artificial
  primer
gagggtggcaattccatctgttatg

SEQ ID NO: 3003 - DNA, 25 bp, Artificial
  primer
gacatagccgccatgttgatttcac

SEQ ID NO: 3004 - DNA, 25 bp, Artificial
  primer
tgtggccttggaacgagtttcccat

SEQ ID NO: 3005 - DNA, 25 bp, Artificial
  primer
tctccaaagataaacctactcccca

SEQ ID NO: 3006 - DNA, 25 bp, Artificial
  primer
tccccacaagaactggcctttaatg

SEQ ID NO: 3007 - DNA, 25 bp, Artificial
  primer
aatgtggtataactgttccgctgcc

SEQ ID NO: 3008 - DNA, 25 bp, Artificial
  primer
actgagtaccagcatgtccatttga

SEQ ID NO: 3009 - DNA, 25 bp, Artificial
  primer
cctcctgcttagttcactttgtatc

SEQ ID NO: 3010 - DNA, 25 bp, Artificial
  primer
tcccccagttttgggacactgtgct

SEQ ID NO: 3011 - DNA, 25 bp, Artificial
  primer
acactgtgcttacctccaaaaatct

SEQ ID NO: 3012 - DNA, 25 bp, Artificial
  primer
tccaaaaatctcatctcttccctgg

SEQ ID NO: 3013 - DNA, 25 bp, Artificial
  primer
gagtgactttgttgtatggctaccc

SEQ ID NO: 3014 - DNA, 25 bp, Artificial
  primer
tatggctacccttgtgatctacagt

SEQ ID NO: 3015 - DNA, 25 bp, Artificial
  primer
tctgcctgcaggtttctatgctgtt

SEQ ID NO: 3016 - DNA, 25 bp, Artificial
  primer
tcttagcacagaatccagcctagcc

SEQ ID NO: 3017 - DNA, 25 bp, Artificial
  primer
cctagccttagccgcagtctaggcc

SEQ ID NO: 3018 - DNA, 25 bp, Artificial
  primer
tctaggccctgcttggactaggact

SEQ ID NO: 3019 - DNA, 25 bp, Artificial
  primer
ttggactaggactccttgcttgacc

SEQ ID NO: 3020 - DNA, 25 bp, Artificial
  primer
ggctcttggaagacgttccgtgctg

SEQ ID NO: 3021 - DNA, 25 bp, Artificial
  primer
gcagagtccattccatcatgatgct

SEQ ID NO: 3022 - DNA, 25 bp, Artificial
  primer
catgatgctgtgcccgctatgggct

SEQ ID NO: 3023 - DNA, 25 bp, Artificial
  primer
tgcccgctatgggctgtgtccatga

SEQ ID NO: 3024 - DNA, 25 bp, Artificial
  primer
gtgggggtgtgttatagcccctcac

SEQ ID NO: 3025 - DNA, 25 bp, Artificial
  primer
ccctctggaatggcatcccatgagc

SEQ ID NO: 3026 - DNA, 25 bp, Artificial
  primer
tgatttgtcctgcagtgctcattca

SEQ ID NO: 3027 - DNA, 25 bp, Artificial
  primer
aacagcaggccatctttttatgcaa

SEQ ID NO: 3028 - DNA, 25 bp, Artificial
  primer
acttcactggtgtacatcgtttact

SEQ ID NO: 3029 - DNA, 25 bp, Artificial
  primer
tcgtttactttttaactggcttcat

SEQ ID NO: 3030 - DNA, 25 bp, Artificial
  primer
agaaatgcggaccaaactacttcat

SEQ ID NO: 3031 - DNA, 25 bp, Artificial
  primer
actacttcattttctcaaagggcat

SEQ ID NO: 3032 - DNA, 25 bp, Artificial
  primer
gcataccttgtgcattgtggcttat

SEQ ID NO: 3033 - DNA, 25 bp, Artificial
  primer
gatgagccatattaattgcctgtta

SEQ ID NO: 3034 - DNA, 25 bp, Artificial
  primer
gttattattaccagcatttgtcctt

SEQ ID NO: 3035 - DNA, 25 bp, Artificial
  primer
atacttgcactctttaacacattct

SEQ ID NO: 3036 - DNA, 25 bp, Artificial
  primer
agaggagtgttattgcatgctgata

SEQ ID NO: 3037 - DNA, 25 bp, Artificial
  primer
acatgcaacatgctgttcctccagc

SEQ ID NO: 3038 - DNA, 25 bp, Artificial
  primer
gtacctttggggcatgggggcatta

SEQ ID NO: 3039 - DNA, 25 bp, Artificial
  primer
gggatgcttgtgtaatcgaccacct

SEQ ID NO: 3040 - DNA, 25 bp, Artificial
  primer
tccagagaagcatcccagggctttg

SEQ ID NO: 3041 - DNA, 25 bp, Artificial
  primer
ggctttgtgacagtctctaattccc

SEQ ID NO: 3042 - DNA, 25 bp, Artificial
  primer
tcccttcccttctcgttaagaatca

SEQ ID NO: 3043 - DNA, 25 bp, Artificial
  primer
gtattcattgggttactcctattat

SEQ ID NO: 3044 - DNA, 25 bp, Artificial
  primer
agatctttagcttttattccttatt

SEQ ID NO: 3045 - DNA, 25 bp, Artificial
  primer
ttattgatcatgttgctggctttta

SEQ ID NO: 3046 - DNA, 25 bp, Artificial
  primer
gcgaaggaggagcactgcctcagcc

SEQ ID NO: 3047 - DNA, 25 bp, Artificial
  primer
gcctcagcctttgcacatggtaatg

SEQ ID NO: 3048 - DNA, 25 bp, Artificial
  primer
aacagagtactgcagagatctaatc

SEQ ID NO: 3049 - DNA, 25 bp, Artificial
  primer
aaaactcactccattgaaactgatt

SEQ ID NO: 3050 - DNA, 25 bp, Artificial
  primer
gaaactgattgattcttggatggga

SEQ ID NO: 3051 - DNA, 25 bp, Artificial
  primer
ggatgggaaagggtgcagcaaaact

SEQ ID NO: 3052 - DNA, 25 bp, Artificial
  primer
tcccacacttcctcgtgaagatctg

SEQ ID NO: 3053 - DNA, 25 bp, Artificial
  primer
ggagaagattattgcacactttcta

SEQ ID NO: 3054 - DNA, 25 bp, Artificial
  primer
agaactctttcagggctgaatcgtc

SEQ ID NO: 3055 - DNA, 25 bp, Artificial
  primer
agggctgaatcgtctcaaacttgtc

SEQ ID NO: 3056 - DNA, 25 bp, Artificial
  primer
tcgtctcaaacttgtcattctgaac

SEQ ID NO: 3057 - DNA, 25 bp, Artificial
  primer
ccagaagaaggctgcaaacatgctt

SEQ ID NO: 3058 - DNA, 25 bp, Artificial
  primer
gatgatgcctgatatgaatgttact

SEQ ID NO: 3059 - DNA, 25 bp, Artificial
  primer
catcttcggtgacaccctggggtga

SEQ ID NO: 3060 - DNA, 25 bp, Artificial
  primer
tctcgaggagccacattttcctcct

SEQ ID NO: 3061 - DNA, 25 bp, Artificial
  primer
ggacccagaccaggtgtctgcagtc

SEQ ID NO: 3062 - DNA, 25 bp, Artificial
  primer
acatcaggggtttcctgtggccgtt

SEQ ID NO: 3063 - DNA, 25 bp, Artificial
  primer
gttggctggtgggtcacccagcaga

SEQ ID NO: 3064 - DNA, 25 bp, Artificial
  primer
gactgcggttattcctggaggtcgg

SEQ ID NO: 3065 - DNA, 25 bp, Artificial
  primer
ggaggtcggcagacatgccaacctt

SEQ ID NO: 3066 - DNA, 25 bp, Artificial
  primer
atgccaaccttgggctatttgagct

SEQ ID NO: 3067 - DNA, 25 bp, Artificial
  primer
tgtgatgctagccggtggctttctg

SEQ ID NO: 3068 - DNA, 25 bp, Artificial
  primer
gtttgaggctcccctgggaactaga

SEQ ID NO: 3069 - DNA, 25 bp, Artificial
  primer
caaggcgttattgggccacctgaca

SEQ ID NO: 3070 - DNA, 25 bp, Artificial
  primer
ttgaccacgtctctgctgtgaatag

SEQ ID NO: 3071 - DNA, 25 bp, Artificial
  primer
ctcagacattcttatccttctggag

SEQ ID NO: 3072 - DNA, 25 bp, Artificial
  primer
tcttatccttctggagtctcaaccc

SEQ ID NO: 3073 - DNA, 25 bp, Artificial
  primer
gagtctcaacccatcaggttcagac

SEQ ID NO: 3074 - DNA, 25 bp, Artificial
  primer
aacccatcaggttcagaccagtagg

SEQ ID NO: 3075 - DNA, 25 bp, Artificial
  primer
gaccagtaggaaccaggctgggtca

SEQ ID NO: 3076 - DNA, 25 bp, Artificial
  primer
caggctgggtcaggctcttaatttc

SEQ ID NO: 3077 - DNA, 25 bp, Artificial
  primer
aggctcttaatttcactacggtggg

SEQ ID NO: 3078 - DNA, 25 bp, Artificial
  primer
aaatgctcagaggtctgtgctacct

SEQ ID NO: 3079 - DNA, 25 bp, Artificial
  primer
taaggatcgtattccctgctttaag

SEQ ID NO: 3080 - DNA, 25 bp, Artificial
  primer
tggtagtcttgtttgggtgatgaga

SEQ ID NO: 3081 - DNA, 25 bp, Artificial
  primer
cagtggggagtgctgtgtctcctgg

SEQ ID NO: 3082 - DNA, 25 bp, Artificial
  primer
gccaagcaggaactccaggtgcagg

SEQ ID NO: 3083 - DNA, 25 bp, Artificial
  primer
tgggggctcttgcgtggtgagagta

SEQ ID NO: 3084 - DNA, 25 bp, Artificial
  primer
tgcgtggtgagagtaggggtccccc

SEQ ID NO: 3085 - DNA, 25 bp, Artificial
  primer
ttggtggggaacagaacctccgcat

SEQ ID NO: 3086 - DNA, 25 bp, Artificial
  primer
acctccgcatcgtgtagttttgtga

SEQ ID NO: 3087 - DNA, 25 bp, Artificial
  primer
tacttgagctgtctgtaccccagaa

SEQ ID NO: 3088 - DNA, 25 bp, Artificial
  primer
tgtaccccagaatcaaacacagaac

SEQ ID NO: 3089 - DNA, 25 bp, Artificial
  primer
ctcagaatcctgcactcaaggtggc

SEQ ID NO: 3090 - DNA, 25 bp, Artificial
  primer
taaacctggaaacatgtccttacta

SEQ ID NO: 3091 - DNA, 25 bp, Artificial
  primer
acatgtccttactaggtgttttatc

SEQ ID NO: 3092 - DNA, 25 bp, Artificial
  primer
tggtaaagcaccagtactccaacct

SEQ ID NO: 3093 - DNA, 25 bp, Artificial
  primer
ctccaaccttccagaaagccgatta

SEQ ID NO: 3094 - DNA, 25 bp, Artificial
  primer
agccgattatcttcattgcttttaa

SEQ ID NO: 3095 - DNA, 25 bp, Artificial
  primer
ctgtggcatatggttttctgttact

SEQ ID NO: 3096 - DNA, 25 bp, Artificial
  primer
tttcgttgtcaaaatgccataccca

SEQ ID NO: 3097 - DNA, 25 bp, Artificial
  primer
tccacataatgcataagccacacca

SEQ ID NO: 3098 - DNA, 25 bp, Artificial
  primer
gccacaccaaaaccagactcaattt

SEQ ID NO: 3099 - DNA, 25 bp, Artificial
  primer
ccaaatgagtccatacccatcttca

SEQ ID NO: 3100 - DNA, 25 bp, Artificial
  primer
ttttgtaattcttgtccacttgtaa

SEQ ID NO: 3101 - DNA, 25 bp, Artificial
  primer
catacttttcagactgcctttcttt

SEQ ID NO: 3102 - DNA, 25 bp, Artificial
  primer
atccatgtgtggttaagctctgtgt

SEQ ID NO: 3103 - DNA, 25 bp, Artificial
  primer
aatacaccagcagttgtcattcaat

SEQ ID NO: 3104 - DNA, 25 bp, Artificial
  primer
atgcaggtttttgtacttaattata

SEQ ID NO: 3105 - DNA, 25 bp, Artificial
  primer
gcagaaacggaaattgacctccccg

SEQ ID NO: 3106 - DNA, 25 bp, Artificial
  primer
ctccccgccatgtgtttaatattcc

SEQ ID NO: 3107 - DNA, 25 bp, Artificial
  primer
ccatgtgtttaatattcctcctgct

SEQ ID NO: 3108 - DNA, 25 bp, Artificial
  primer
atcgtaagccttgagagtgtttgtg

SEQ ID NO: 3109 - DNA, 25 bp, Artificial
  primer
gatagattccagatatgctttttga

SEQ ID NO: 3110 - DNA, 25 bp, Artificial
  primer
gcacacctgcattttagctctgcat

SEQ ID NO: 3111 - DNA, 25 bp, Artificial
  primer
gcaggctgcgtgtttaagaatttca

SEQ ID NO: 3112 - DNA, 25 bp, Artificial
  primer
ctggctggtgtgagaagtcttccgt

SEQ ID NO: 3113 - DNA, 25 bp, Artificial
  primer
gaagtcttccgttagcatagagtgg

SEQ ID NO: 3114 - DNA, 25 bp, Artificial
  primer
ctgaaggagtgtccctcctctatgt

SEQ ID NO: 3115 - DNA, 25 bp, Artificial
  primer
gaagagggcagaatccgcagctctc

SEQ ID NO: 3116 - DNA, 25 bp, Artificial
  primer
tgtgatgtgtagcatgtctgccctc

SEQ ID NO: 3117 - DNA, 25 bp, Artificial
  primer
ccctctgactggacatcattgccat

SEQ ID NO: 3118 - DNA, 25 bp, Artificial
  primer
catcattgccattaactttcttctg

SEQ ID NO: 3119 - DNA, 25 bp, Artificial
  primer
tttcttctgggcatcacggcaatgt

SEQ ID NO: 3120 - DNA, 25 bp, Artificial
  primer
gtcacgatgcccagacttggagcaa

SEQ ID NO: 3121 - DNA, 25 bp, Artificial
  primer
aggcaaccttggagtcagtccactc

SEQ ID NO: 3122 - DNA, 25 bp, Artificial
  primer
atgtacatagttcaactctttcttt

SEQ ID NO: 3123 - DNA, 25 bp, Artificial
  primer
tatccatggatatcagtctgctttg

SEQ ID NO: 3124 - DNA, 25 bp, Artificial
  primer
gactcctctgctagtgttacagatg

SEQ ID NO: 3125 - DNA, 25 bp, Artificial
  primer
aaatcttaatctggacccttttcat

SEQ ID NO: 3126 - DNA, 25 bp, Artificial
  primer
ggacccttttcataagatggtgcca

SEQ ID NO: 3127 - DNA, 25 bp, Artificial
  primer
aaaacaagatccacatgtcacccac

SEQ ID NO: 3128 - DNA, 25 bp, Artificial
  primer
tccggaggcagcccaaatatccttg

SEQ ID NO: 3129 - DNA, 25 bp, Artificial
  primer
gagaaataagcttgaccaccatgtt

SEQ ID NO: 3130 - DNA, 25 bp, Artificial
  primer
accaccatgttatcatcaagtttcc

SEQ ID NO: 3131 - DNA, 25 bp, Artificial
  primer
cgctgaccactgagtaggctgtgaa

SEQ ID NO: 3132 - DNA, 25 bp, Artificial
  primer
acaacagcctacttgtgttcactgt

SEQ ID NO: 3133 - DNA, 25 bp, Artificial
  primer
aagtcaacactctgattcagtctga

SEQ ID NO: 3134 - DNA, 25 bp, Artificial
  primer
ctcctgactacgatgctttggttgt

SEQ ID NO: 3135 - DNA, 25 bp, Artificial
  primer
gatgctttggttgttgccaccaaaa

SEQ ID NO: 3136 - DNA, 25 bp, Artificial
  primer
aattctgatgtcgtacctaaggctt

SEQ ID NO: 3137 - DNA, 25 bp, Artificial
  primer
acctaaggcttgtccatctttgttg

SEQ ID NO: 3138 - DNA, 25 bp, Artificial
  primer
ttgttggaggtgccatggctcctgt

SEQ ID NO: 3139 - DNA, 25 bp, Artificial
  primer
tgaagttcactcttgattgcaccca

SEQ ID NO: 3140 - DNA, 25 bp, Artificial
  primer
attgcacccaccctgtagaagatgg

SEQ ID NO: 3141 - DNA, 25 bp, Artificial
  primer
ggagcaagagcaagatcaccgtgac

SEQ ID NO: 3142 - DNA, 25 bp, Artificial
  primer
atcaccgtgacatccgaggtgcctt

SEQ ID NO: 3143 - DNA, 25 bp, Artificial
  primer
gaataatctacgtgactggttgcgc

SEQ ID NO: 3144 - DNA, 25 bp, Artificial
  primer
ctggttgcgcgtagttgctaacagc

SEQ ID NO: 3145 - DNA, 25 bp, Artificial
  primer
tacgaattacgttacttccagatta

SEQ ID NO: 3146 - DNA, 25 bp, Artificial
  primer
tttatccttgtatctctgcagtgtg

SEQ ID NO: 3147 - DNA, 25 bp, Artificial
  primer
gtggaggtgactggtgatgaataca

SEQ ID NO: 3148 - DNA, 25 bp, Artificial
  primer
gtgactggtgatgaatacaatgtgg

SEQ ID NO: 3149 - DNA, 25 bp, Artificial
  primer
aagcattgatggtcagccaggtgcc

SEQ ID NO: 3150 - DNA, 25 bp, Artificial
  primer
attgatggtcagccaggtgccttca

SEQ ID NO: 3151 - DNA, 25 bp, Artificial
  primer
tgccttcacctgctatttggatgca

SEQ ID NO: 3152 - DNA, 25 bp, Artificial
  primer
gctatttggatgcaggccttgccag

SEQ ID NO: 3153 - DNA, 25 bp, Artificial
  primer
aggccttgccagaactaccactggc

SEQ ID NO: 3154 - DNA, 25 bp, Artificial
  primer
cagaactaccactggcaataaagtt

SEQ ID NO: 3155 - DNA, 25 bp, Artificial
  primer
gcagaagtacatcggaagcacatca

SEQ ID NO: 3156 - DNA, 25 bp, Artificial
  primer
tgcagattacatgcgctacttaatg

SEQ ID NO: 3157 - DNA, 25 bp, Artificial
  primer
tacatgcgctacttaatggaagaag

SEQ ID NO: 3158 - DNA, 25 bp, Artificial
  primer
ccattgccccatgtgaagtcactgt

SEQ ID NO: 3159 - DNA, 25 bp, Artificial
  primer
ccccatgtgaagtcactgtgccagc

SEQ ID NO: 3160 - DNA, 25 bp, Artificial
  primer
ccagcccagaacactggtctcgggc

SEQ ID NO: 3161 - DNA, 25 bp, Artificial
  primer
agcccagaacactggtctcgggccc

SEQ ID NO: 3162 - DNA, 25 bp, Artificial
  primer
gaacactggtctcgggcccgagaag

SEQ ID NO: 3163 - DNA, 25 bp, Artificial
  primer
tggtctcgggcccgagaagacctcc

SEQ ID NO: 3164 - DNA, 25 bp, Artificial
  primer
tttttccaggctttaggtatcacca

SEQ ID NO: 3165 - DNA, 25 bp, Artificial
  primer
ggtatcaccactaaaatctccaggg

SEQ ID NO: 3166 - DNA, 25 bp, Artificial
  primer
caccactaaaatctccaggggcacc

SEQ ID NO: 3167 - DNA, 25 bp, Artificial
  primer
taaaatctccaggggcaccattgaa

SEQ ID NO: 3168 - DNA, 25 bp, Artificial
  primer
atctccaggggcaccattgaaatcc

SEQ ID NO: 3169 - DNA, 25 bp, Artificial
  primer
gccaaggcaggcgatcacatgaggt

SEQ ID NO: 3170 - DNA, 25 bp, Artificial
  primer
cgcgttcgcaccaaaaccgtgaaga

SEQ ID NO: 3171 - DNA, 25 bp, Artificial
  primer
tagaaaagtactacacgcgcctggg

SEQ ID NO: 3172 - DNA, 25 bp, Artificial
  primer
tgcgaggagatcgccattatcccca

SEQ ID NO: 3173 - DNA, 25 bp, Artificial
  primer
tatccccagcaaaaagctccgcaac

SEQ ID NO: 3174 - DNA, 25 bp, Artificial
  primer
gatagcaggttatgtcacgcatctg

SEQ ID NO: 3175 - DNA, 25 bp, Artificial
  primer
gtaagaggtatctccatcaagctgc

SEQ ID NO: 3176 - DNA, 25 bp, Artificial
  primer
tcctgaggtctcagccttggatcag

SEQ ID NO: 3177 - DNA, 25 bp, Artificial
  primer
gcttttggacttcggcagtctgtcc

SEQ ID NO: 3178 - DNA, 25 bp, Artificial
  primer
gtcactcagcctacagttgggatga

SEQ ID NO: 3179 - DNA, 25 bp, Artificial
  primer
gatgaatttcaaaacgcctcgggga

SEQ ID NO: 3180 - DNA, 25 bp, Artificial
  primer
gctagctgtgtgggctgggaggtct

SEQ ID NO: 3181 - DNA, 25 bp, Artificial
  primer
gctgggaggtctggtagggctgagc

SEQ ID NO: 3182 - DNA, 25 bp, Artificial
  primer
agaggatcaacatgcctttggctag

SEQ ID NO: 3183 - DNA, 25 bp, Artificial
  primer
tagagatttactacatccgtccttg

SEQ ID NO: 3184 - DNA, 25 bp, Artificial
  primer
gaaacgcctagtacaaagtccaaat

SEQ ID NO: 3185 - DNA, 25 bp, Artificial
  primer
ggatgtaaaatgtccaggttgctac

SEQ ID NO: 3186 - DNA, 25 bp, Artificial
  primer
gttgctacaagatcaccacggtttt

SEQ ID NO: 3187 - DNA, 25 bp, Artificial
  primer
gccatgctcagacagtggttctttg

SEQ ID NO: 3188 - DNA, 25 bp, Artificial
  primer
cactaatgattcaaacagcttcctg

SEQ ID NO: 3189 - DNA, 25 bp, Artificial
  primer
gtgttgtctcacagaaagccttatc

SEQ ID NO: 3190 - DNA, 25 bp, Artificial
  primer
ggtatacagcagtaatctcctattt

SEQ ID NO: 3191 - DNA, 25 bp, Artificial
  primer
ttgaagtgagtcttgctgatttgca

SEQ ID NO: 3192 - DNA, 25 bp, Artificial
  primer
gagtcttgctgatttgcagaatgat

SEQ ID NO: 3193 - DNA, 25 bp, Artificial
  primer
tcaagctgattactgaagatgttca

SEQ ID NO: 3194 - DNA, 25 bp, Artificial
  primer
gtaaaaactgcctgactaacttcca

SEQ ID NO: 3195 - DNA, 25 bp, Artificial
  primer
aaactgcctgactaacttccatggc

SEQ ID NO: 3196 - DNA, 25 bp, Artificial
  primer
ggcagacaatgattgaagctcacgt

SEQ ID NO: 3197 - DNA, 25 bp, Artificial
  primer
ttgaagctcacgttgatgtcaagac

SEQ ID NO: 3198 - DNA, 25 bp, Artificial
  primer
tacggaagacctcttatgctcagca

SEQ ID NO: 3199 - DNA, 25 bp, Artificial
  primer
ggaaatcatgacccgagaggtgcag

SEQ ID NO: 3200 - DNA, 25 bp, Artificial
  primer
gacccgagaggtgcagacaaatgac

SEQ ID NO: 3201 - DNA, 25 bp, Artificial
  primer
gagaggtgcagacaaatgacttgaa

SEQ ID NO: 3202 - DNA, 25 bp, Artificial
  primer
acagctcaggttttatcaccgactg

SEQ ID NO: 3203 - DNA, 25 bp, Artificial
  primer
acctcaatgctgaaccgcactggag

SEQ ID NO: 3204 - DNA, 25 bp, Artificial
  primer
caaggtacccctgctgaggtgtatg

SEQ ID NO: 3205 - DNA, 25 bp, Artificial
  primer
ccctctgctactcccaggaaatggg

SEQ ID NO: 3206 - DNA, 25 bp, Artificial
  primer
accacagccccaggagggtgtcaac

SEQ ID NO: 3207 - DNA, 25 bp, Artificial
  primer
atagcagcagcactctaggcatggt

SEQ ID NO: 3208 - DNA, 25 bp, Artificial
  primer
gcatggtgaacgcctgggaccaagc

SEQ ID NO: 3209 - DNA, 25 bp, Artificial
  primer
gggaccaagccatgtggcgtttttt

SEQ ID NO: 3210 - DNA, 25 bp, Artificial
  primer
aagatatgtctcttcattctctctc

SEQ ID NO: 3211 - DNA, 25 bp, Artificial
  primer
tcattctctctcagtatttgtttac

SEQ ID NO: 3212 - DNA, 25 bp, Artificial
  primer
gcaaaactttgtcgactggcactgt

SEQ ID NO: 3213 - DNA, 25 bp, Artificial
  primer
tccgagctaaaatcccagggaccgg

SEQ ID NO: 3214 - DNA, 25 bp, Artificial
  primer
ttacctgagcgaccaggactacatt

SEQ ID NO: 3215 - DNA, 25 bp, Artificial
  primer
gcctgctgggacttgtagttgccta

SEQ ID NO: 3216 - DNA, 25 bp, Artificial
  primer
tgctgggacttgtagttgcctagac

SEQ ID NO: 3217 - DNA, 25 bp, Artificial
  primer
tgggacttgtagttgcctagacagg

SEQ ID NO: 3218 - DNA, 25 bp, Artificial
  primer
tgtagttgcctagacagggcaccac

SEQ ID NO: 3219 - DNA, 25 bp, Artificial
  primer
gtagttgcctagacagggcaccacc

SEQ ID NO: 3220 - DNA, 25 bp, Artificial
  primer
aggcgttggtgtctcctggatgcta

SEQ ID NO: 3221 - DNA, 25 bp, Artificial
  primer
ggcgttggtgtctcctggatgctac

SEQ ID NO: 3222 - DNA, 25 bp, Artificial
  primer
gcgttggtgtctcctggatgctact

SEQ ID NO: 3223 - DNA, 25 bp, Artificial
  primer
cgttggtgtctcctggatgctacta

SEQ ID NO: 3224 - DNA, 25 bp, Artificial
  primer
gggaggcctgagcttggatttacac

SEQ ID NO: 3225 - DNA, 25 bp, Artificial
  primer
ggaggcctgagcttggatttacact

SEQ ID NO: 3226 - DNA, 25 bp, Artificial
  primer
ggcctgagcttggatttacactgta

SEQ ID NO: 3227 - DNA, 25 bp, Artificial
  primer
ctgagcttggatttacactgtaata

SEQ ID NO: 3228 - DNA, 25 bp, Artificial
  primer
cttggatttacactgtaataaagac

SEQ ID NO: 3229 - DNA, 25 bp, Artificial
  primer
aggccagttcgttggatggctcttg

SEQ ID NO: 3230 - DNA, 25 bp, Artificial
  primer
ctctagcgctagtgatgtgtgggcc

SEQ ID NO: 3231 - DNA, 25 bp, Artificial
  primer
tgggaactcatgactctgggccaga

SEQ ID NO: 3232 - DNA, 25 bp, Artificial
  primer
atggttaccgaatagcccagccaat

SEQ ID NO: 3233 - DNA, 25 bp, Artificial
  primer
cccagccaatcaactgtcctgatga

SEQ ID NO: 3234 - DNA, 25 bp, Artificial
  primer
tatttgctgtgatggcctgttgctg

SEQ ID NO: 3235 - DNA, 25 bp, Artificial
  primer
cctgttgctgggccttagatccaga

SEQ ID NO: 3236 - DNA, 25 bp, Artificial
  primer
gtttcagcagctggtacagtgccta

SEQ ID NO: 3237 - DNA, 25 bp, Artificial
  primer
gcctaacagagtttcatgcagccct

SEQ ID NO: 3238 - DNA, 25 bp, Artificial
  primer
aggaagaaggtgcctgtcggggctc

SEQ ID NO: 3239 - DNA, 25 bp, Artificial
  primer
tcggggctcacttgaagcctgtcag

SEQ ID NO: 3240 - DNA, 25 bp, Artificial
  primer
agttgctaacatcatcttccttatt

SEQ ID NO: 3241 - DNA, 25 bp, Artificial
  primer
ttcagccagtgctgttactgcattt

SEQ ID NO: 3242 - DNA, 25 bp, Artificial
  primer
gttactgcatttagcatggctctga

SEQ ID NO: 3243 - DNA, 25 bp, Artificial
  primer
gcatggctctgacgaggcagtggag

SEQ ID NO: 3244 - DNA, 25 bp, Artificial
  primer
gcagtggagagttcctgacagcata

SEQ ID NO: 3245 - DNA, 25 bp, Artificial
  primer
gacagcatagcatactgccttctga

SEQ ID NO: 3246 - DNA, 25 bp, Artificial
  primer
agcatactgccttctgacagactgg

SEQ ID NO: 3247 - DNA, 25 bp, Artificial
  primer
gacagactgggttaagctaccaaaa

SEQ ID NO: 3248 - DNA, 25 bp, Artificial
  primer
gactttaacaccatatatttccctc

SEQ ID NO: 3249 - DNA, 25 bp, Artificial
  primer
gtcttccagaatacaaactactccc

SEQ ID NO: 3250 - DNA, 25 bp, Artificial
  primer
actactcccagttagatatcagtga

SEQ ID NO: 3251 - DNA, 25 bp, Artificial
  primer
ttagaacccacatatctttttttgt

SEQ ID NO: 3252 - DNA, 25 bp, Artificial
  primer
gattggcatttgttaagtgttctat

SEQ ID NO: 3253 - DNA, 25 bp, Artificial
  primer
taaaatggtcttcacacagcagtca

SEQ ID NO: 3254 - DNA, 25 bp, Artificial
  primer
ttcacacagcagtcatccgtgtcat

SEQ ID NO: 3255 - DNA, 25 bp, Artificial
  primer
gtcatccgtgtcatttatcattttg

SEQ ID NO: 3256 - DNA, 25 bp, Artificial
  primer
gggacttggattatttatctagaga

SEQ ID NO: 3257 - DNA, 25 bp, Artificial
  primer
taactaatactgcgctgccatcatg

SEQ ID NO: 3258 - DNA, 25 bp, Artificial
  primer
gcgctgccatcatggtgactgtcat

SEQ ID NO: 3259 - DNA, 25 bp, Artificial
  primer
gtcatggttctacagaaatgccctc

SEQ ID NO: 3260 - DNA, 25 bp, Artificial
  primer
tccatgtgtccctctaatgttgcat

SEQ ID NO: 3261 - DNA, 25 bp, Artificial
  primer
aatgttgcatgtttcagtgggttgg

SEQ ID NO: 3262 - DNA, 25 bp, Artificial
  primer
cccggtgagcaaaaggttccctgtg

SEQ ID NO: 3263 - DNA, 25 bp, Artificial
  primer
tccctgtggggcccccgaagaatga

SEQ ID NO: 3264 - DNA, 25 bp, Artificial
  primer
atgataccccaaataggcagtactg

SEQ ID NO: 3265 - DNA, 25 bp, Artificial
  primer
gaaagtgctggaatacctcaatcaa

SEQ ID NO: 3266 - DNA, 25 bp, Artificial
  primer
cattaattaccctactttcattcct

SEQ ID NO: 3267 - DNA, 25 bp, Artificial
  primer
agtgtgttgacttctatcctgttaa

SEQ ID NO: 3268 - DNA, 25 bp, Artificial
  primer
caggcagatgaaaccaggtcactgg

SEQ ID NO: 3269 - DNA, 25 bp, Artificial
  primer
ctgagctgttatcttgtgtatggat

SEQ ID NO: 3270 - DNA, 25 bp, Artificial
  primer
gtgtaaatgttatgactccttgata

SEQ ID NO: 3271 - DNA, 25 bp, Artificial
  primer
gctgtggcattgttgatgctcacat

SEQ ID NO: 3272 - DNA, 25 bp, Artificial
  primer
gttactgtctgtagcgttttgtgga

SEQ ID NO: 3273 - DNA, 25 bp, Artificial
  primer
gatcttaagcttttgtgtcagatta

SEQ ID NO: 3274 - DNA, 25 bp, Artificial
  primer
tgatgacttcatgctttattatgcc

SEQ ID NO: 3275 - DNA, 25 bp, Artificial
  primer
tatgccttattatggctgacgtatt

SEQ ID NO: 3276 - DNA, 25 bp, Artificial
  primer
ggctgacgtattactgtggtgaaac

SEQ ID NO: 3277 - DNA, 25 bp, Artificial
  primer
ataaagtacctttgagcatgagtgt

SEQ ID NO: 3278 - DNA, 25 bp, Artificial
  primer
gcatgagtgtatcacagctttcatt

SEQ ID NO: 3279 - DNA, 25 bp, Artificial
  primer
ggaaaacttttcattacatacttgt

SEQ ID NO: 3280 - DNA, 25 bp, Artificial
  primer
acttgtttaaactctgtcttccagg

SEQ ID NO: 3281 - DNA, 25 bp, Artificial
  primer
ttcaggtggtatttgcattcagtgc

SEQ ID NO: 3282 - DNA, 25 bp, Artificial
  primer
agtgccttactggtattctcagaac

SEQ ID NO: 3283 - DNA, 25 bp, Artificial
  primer
aataaaactgacatttactcttgac

SEQ ID NO: 3284 - DNA, 25 bp, Artificial
  primer
gctacaggccaaatttgagcacctt

SEQ ID NO: 3285 - DNA, 25 bp, Artificial
  primer
gagcaccttaagagacttcaccaag

SEQ ID NO: 3286 - DNA, 25 bp, Artificial
  primer
ctacctccgagatatttcacagcca

SEQ ID NO: 3287 - DNA, 25 bp, Artificial
  primer
ttcacagccagtcctttctggcaac

SEQ ID NO: 3288 - DNA, 25 bp, Artificial
  primer
gtcctttctggcaacaggcagcaac

SEQ ID NO: 3289 - DNA, 25 bp, Artificial
  primer
gacaaggaccgtaagaactccaatt

SEQ ID NO: 3290 - DNA, 25 bp, Artificial
  primer
gagcacagaaggtcatcatcacaag

SEQ ID NO: 3291 - DNA, 25 bp, Artificial
  primer
gctgttatttgttttatcacttcta

SEQ ID NO: 3292 - DNA, 25 bp, Artificial
  primer
ggtgaacagccacagttactgatat

SEQ ID NO: 3293 - DNA, 25 bp, Artificial
  primer
gatactacaagttgagcatctctaa

SEQ ID NO: 3294 - DNA, 25 bp, Artificial
  primer
tctttttgagcactgacttgacccc

SEQ ID NO: 3295 - DNA, 25 bp, Artificial
  primer
agttacctactattctgacatttta

SEQ ID NO: 3296 - DNA, 25 bp, Artificial
  primer
cttgtgctggtgttttggatcttat

SEQ ID NO: 3297 - DNA, 25 bp, Artificial
  primer
gatgctgagcatgttctgcactggt

SEQ ID NO: 3298 - DNA, 25 bp, Artificial
  primer
tttacacacatacgtgctacccaga

SEQ ID NO: 3299 - DNA, 25 bp, Artificial
  primer
agacagcaacatacgcactcctaaa

SEQ ID NO: 3300 - DNA, 25 bp, Artificial
  primer
aagtatctaactcatttccaaacat

SEQ ID NO: 3301 - DNA, 25 bp, Artificial
  primer
taaacctcttgatttccagcaacat

SEQ ID NO: 3302 - DNA, 25 bp, Artificial
  primer
aacacctgctactcaaaacacaact

SEQ ID NO: 3303 - DNA, 25 bp, Artificial
  primer
atatctggtatgttgcaagctttca

SEQ ID NO: 3304 - DNA, 25 bp, Artificial
  primer
ataaatttgcctcctagttcacttt

SEQ ID NO: 3305 - DNA, 25 bp, Artificial
  primer
tgaacctaactttctcttattggtg

SEQ ID NO: 3306 - DNA, 25 bp, Artificial
  primer
gaagcgtttaggcatgtttaacatc

SEQ ID NO: 3307 - DNA, 25 bp, Artificial
  primer
gcatgtttaacatccagcactgtaa

SEQ ID NO: 3308 - DNA, 25 bp, Artificial
  primer
agcactgtaagaagctgtccagctg

SEQ ID NO: 3309 - DNA, 25 bp, Artificial
  primer
gaggggaaactacagcacctggaaa

SEQ ID NO: 3310 - DNA, 25 bp, Artificial
  primer
cacctggaaaatgaactcacccacg

SEQ ID NO: 3311 - DNA, 25 bp, Artificial
  primer
atgaactcacccacgatatcatcac

SEQ ID NO: 3312 - DNA, 25 bp, Artificial
  primer
cccacgatatcatcaccaagttcct

SEQ ID NO: 3313 - DNA, 25 bp, Artificial
  primer
gaagacagaaggtctgccagcttac

SEQ ID NO: 3314 - DNA, 25 bp, Artificial
  primer
gaaggtctgccagcttacatttacc

SEQ ID NO: 3315 - DNA, 25 bp, Artificial
  primer
gcttacatttacccaaactgtccat

SEQ ID NO: 3316 - DNA, 25 bp, Artificial
  primer
ttacccaaactgtccattactggaa

SEQ ID NO: 3317 - DNA, 25 bp, Artificial
  primer
tactggaacctatgatctgaagagc

SEQ ID NO: 3318 - DNA, 25 bp, Artificial
  primer
acctatgatctgaagagcgtcctgg

SEQ ID NO: 3319 - DNA, 25 bp, Artificial
  primer
tgggtcaactgggcatcactaaggt

SEQ ID NO: 3320 - DNA, 25 bp, Artificial
  primer
ggtcaactgggcatcactaaggtct

SEQ ID NO: 3321 - DNA, 25 bp, Artificial
  primer
ggccgtgcataaggctgtgctgacc

SEQ ID NO: 3322 - DNA, 25 bp, Artificial
  primer
tgcataaggctgtgctgaccatcga

SEQ ID NO: 3323 - DNA, 25 bp, Artificial
  primer
aaaccctttgtcttcttaatgattg

SEQ ID NO: 3324 - DNA, 25 bp, Artificial
  primer
cctttgtcttcttaatgattgaaca

SEQ ID NO: 3325 - DNA, 25 bp, Artificial
  primer
tgaacaaaataccaagtctcccctc

SEQ ID NO: 3326 - DNA, 25 bp, Artificial
  primer
cacccaaaaataactgcctctcgct

SEQ ID NO: 3327 - DNA, 25 bp, Artificial
  primer
ccccctccctggatgacattaaaga

SEQ ID NO: 3328 - DNA, 25 bp, Artificial
  primer
tggatgggctgagactcctcgaaca

SEQ ID NO: 3329 - DNA, 25 bp, Artificial
  primer
tgggtggaagcactccagttctgac

SEQ ID NO: 3330 - DNA, 25 bp, Artificial
  primer
agttctgacccctggaaagacacca

SEQ ID NO: 3331 - DNA, 25 bp, Artificial
  primer
aaagacaccaattggcacaccagcc

SEQ ID NO: 3332 - DNA, 25 bp, Artificial
  primer
acccctactccaggtcacataatga

SEQ ID NO: 3333 - DNA, 25 bp, Artificial
  primer
tgaacagcttcaggcttggcggtgg

SEQ ID NO: 3334 - DNA, 25 bp, Artificial
  primer
aaatcgcccactttctgatgaggaa

SEQ ID NO: 3335 - DNA, 25 bp, Artificial
  primer
aggatataaggtacttcctcctcca

SEQ ID NO: 3336 - DNA, 25 bp, Artificial
  primer
tcctccagctggttatgttcctatt

SEQ ID NO: 3337 - DNA, 25 bp, Artificial
  primer
gttcctattcgaactccagctcgaa

SEQ ID NO: 3338 - DNA, 25 bp, Artificial
  primer
cagctactccaacacctttgggtgg

SEQ ID NO: 3339 - DNA, 25 bp, Artificial
  primer
gccattcatgcttctatgcatatta

SEQ ID NO: 3340 - DNA, 25 bp, Artificial
  primer
atattaggctacgtattccacattg

SEQ ID NO: 3341 - DNA, 25 bp, Artificial
  primer
aagcatgagagtgtctaggcctttg

SEQ ID NO: 3342 - DNA, 25 bp, Artificial
  primer
taggcctttgaatggcatatgccat

SEQ ID NO: 3343 - DNA, 25 bp, Artificial
  primer
tctgggaaatgcatctggaggctaa

SEQ ID NO: 3344 - DNA, 25 bp, Artificial
  primer
ggaggctaagtattgctttctacaa

SEQ ID NO: 3345 - DNA, 25 bp, Artificial
  primer
gtttggcatataggaagcacgctgg

SEQ ID NO: 3346 - DNA, 25 bp, Artificial
  primer
gcacgctggtgctaagtatttttta

SEQ ID NO: 3347 - DNA, 25 bp, Artificial
  primer
aaatggatcttttatggccctatga

SEQ ID NO: 3348 - DNA, 25 bp, Artificial
  primer
gccctatgatctatcctttacttga

SEQ ID NO: 3349 - DNA, 25 bp, Artificial
  primer
aaagaccaacaaatctcaagcccta

SEQ ID NO: 3350 - DNA, 25 bp, Artificial
  primer
atcaggctacctagactgcctcatg

SEQ ID NO: 3351 - DNA, 25 bp, Artificial
  primer
gatcctacacgcctacaggaacgag

SEQ ID NO: 3352 - DNA, 25 bp, Artificial
  primer
cagaaggtcttcgagatctgcgtct

SEQ ID NO: 3353 - DNA, 25 bp, Artificial
  primer
tctgcgtctgcgccaatgggagatt

SEQ ID NO: 3354 - DNA, 25 bp, Artificial
  primer
gagctgggtccacttgtcagataaa

SEQ ID NO: 3355 - DNA, 25 bp, Artificial
  primer
aaacacaagtgtctgcctctgaaag

SEQ ID NO: 3356 - DNA, 25 bp, Artificial
  primer
ccttttttggctttagacactggct

SEQ ID NO: 3357 - DNA, 25 bp, Artificial
  primer
acactggctgccagctatttttact

SEQ ID NO: 3358 - DNA, 25 bp, Artificial
  primer
gtgtgcgtgcttgagtgtgttcgcg

SEQ ID NO: 3359 - DNA, 25 bp, Artificial
  primer
gtgttcgcgtgtgtgggtggatata

SEQ ID NO: 3360 - DNA, 25 bp, Artificial
  primer
ctgcgatatccactgtcattttcca

SEQ ID NO: 3361 - DNA, 25 bp, Artificial
  primer
aatctctctgagtctctttgtgcat

SEQ ID NO: 3362 - DNA, 25 bp, Artificial
  primer
ctttgtgcattggtcatcagcacca

SEQ ID NO: 3363 - DNA, 25 bp, Artificial
  primer
atcagcaccagttccagacaggcat

SEQ ID NO: 3364 - DNA, 25 bp, Artificial
  primer
gacaggcatagtttcagaccaccct

SEQ ID NO: 3365 - DNA, 25 bp, Artificial
  primer
gtcctacacttccacaaggtgcaac

SEQ ID NO: 3366 - DNA, 25 bp, Artificial
  primer
aaaggtcaccgacactgagtactca

SEQ ID NO: 3367 - DNA, 25 bp, Artificial
  primer
gaacatggtacctctcagtgtattg

SEQ ID NO: 3368 - DNA, 25 bp, Artificial
  primer
ctaaggcctctcttgttggcttgta

SEQ ID NO: 3369 - DNA, 25 bp, Artificial
  primer
acatggtctttcctctgagtgtgtt

SEQ ID NO: 3370 - DNA, 25 bp, Artificial
  primer
tgtcctaatcttctcttcttataaa

SEQ ID NO: 3371 - DNA, 25 bp, Artificial
  primer
atattggattagggcctccccatga

SEQ ID NO: 3372 - DNA, 25 bp, Artificial
  primer
ctgaattatatgtgagcccagccct

SEQ ID NO: 3373 - DNA, 25 bp, Artificial
  primer
ttttcccgtgttctaatgtattttg

SEQ ID NO: 3374 - DNA, 25 bp, Artificial
  primer
gtgtttaccaagccgttggtctcct

SEQ ID NO: 3375 - DNA, 25 bp, Artificial
  primer
tctcctaagggcctcctgatggaag

SEQ ID NO: 3376 - DNA, 25 bp, Artificial
  primer
gtgttaacattgagactctggcccc

SEQ ID NO: 3377 - DNA, 25 bp, Artificial
  primer
tggccccagattggtatcttctatg

SEQ ID NO: 3378 - DNA, 25 bp, Artificial
  primer
gggtgacattgaaaacggcctgctt

SEQ ID NO: 3379 - DNA, 25 bp, Artificial
  primer
tgaaaacggcctgctttccaaatgt

SEQ ID NO: 3380 - DNA, 25 bp, Artificial
  primer
gtaattggttagccccagacttggg

SEQ ID NO: 3381 - DNA, 25 bp, Artificial
  primer
gaaggcataggccagggtggttatt

SEQ ID NO: 3382 - DNA, 25 bp, Artificial
  primer
atgtgttacagacctcggttctcat

SEQ ID NO: 3383 - DNA, 25 bp, Artificial
  primer
acaccatgatgaagttcgcctgctt

SEQ ID NO: 3384 - DNA, 25 bp, Artificial
  primer
tcgcctgctttgaacgtactgttga

SEQ ID NO: 3385 - DNA, 25 bp, Artificial
  primer
tgtacaagtttgtggttcctaagcc

SEQ ID NO: 3386 - DNA, 25 bp, Artificial
  primer
tcctaagccccgcagtgaatgttca

SEQ ID NO: 3387 - DNA, 25 bp, Artificial
  primer
accctgctgattctgtggtatctgt

SEQ ID NO: 3388 - DNA, 25 bp, Artificial
  primer
aaaggtagcagtgcttctctggtcc

SEQ ID NO: 3389 - DNA, 25 bp, Artificial
  primer
gtgcttctctggtcctcaagagact

SEQ ID NO: 3390 - DNA, 25 bp, Artificial
  primer
tcatcatgattggtaccctgactgc

SEQ ID NO: 3391 - DNA, 25 bp, Artificial
  primer
gtaccctgactgcactacagtggtt

SEQ ID NO: 3392 - DNA, 25 bp, Artificial
  primer
gtggtttatctatgactccgtgaag

SEQ ID NO: 3393 - DNA, 25 bp, Artificial
  primer
gtgaaggtctacttcagacttcctc

SEQ ID NO: 3394 - DNA, 25 bp, Artificial
  primer
aatgcaaaacaacagctggactgct

SEQ ID NO: 3395 - DNA, 25 bp, Artificial
  primer
agctggactgctgtacatcaaggac

SEQ ID NO: 3396 - DNA, 25 bp, Artificial
  primer
gttccttatgtgtgattgagagcca

SEQ ID NO: 3397 - DNA, 25 bp, Artificial
  primer
gccattcagaaaagacttcctttgt

SEQ ID NO: 3398 - DNA, 25 bp, Artificial
  primer
ttgtgttcagcctatacttttccat

SEQ ID NO: 3399 - DNA, 25 bp, Artificial
  primer
tacttttccatatggtataccttga

SEQ ID NO: 3400 - DNA, 25 bp, Artificial
  primer
attagcacaccatggttatttttct

SEQ ID NO: 3401 - DNA, 25 bp, Artificial
  primer
aagacagagcctgtttactcattta

SEQ ID NO: 3402 - DNA, 25 bp, Artificial
  primer
tgaacatcctagattcacactccca

SEQ ID NO: 3403 - DNA, 25 bp, Artificial
  primer
gacaaagcccaacaatgatctcagg

SEQ ID NO: 3404 - DNA, 25 bp, Artificial
  primer
atgttttcatgtagcagcaatgcag

SEQ ID NO: 3405 - DNA, 25 bp, Artificial
  primer
ggatgataacgctctgcgatgccct

SEQ ID NO: 3406 - DNA, 25 bp, Artificial
  primer
tgccctccacaatttcatcgatggc

SEQ ID NO: 3407 - DNA, 25 bp, Artificial
  primer
tcgatggcctggcgattggggcttc

SEQ ID NO: 3408 - DNA, 25 bp, Artificial
  primer
gactcagtacttccatagcaatcct

SEQ ID NO: 3409 - DNA, 25 bp, Artificial
  primer
atgtgaggagtttccccacgagtta

SEQ ID NO: 3410 - DNA, 25 bp, Artificial
  primer
gagactttgtgatcctactcaatgc

SEQ ID NO: 3411 - DNA, 25 bp, Artificial
  primer
agggatgagcactcgacaagccttg

SEQ ID NO: 3412 - DNA, 25 bp, Artificial
  primer
acaagccttgctattcaacttcctt

SEQ ID NO: 3413 - DNA, 25 bp, Artificial
  primer
tggtgggcaacaatttcgctccaaa

SEQ ID NO: 3414 - DNA, 25 bp, Artificial
  primer
gaaaaaccgatttcaccttcttcat

SEQ ID NO: 3415 - DNA, 25 bp, Artificial
  primer
gccattctactcattaccttgtatg

SEQ ID NO: 3416 - DNA, 25 bp, Artificial
  primer
gtagatcccttcagttcaaaacata

SEQ ID NO: 3417 - DNA, 25 bp, Artificial
  primer
gagtttagtcatcttcgtccagaac

SEQ ID NO: 3418 - DNA, 25 bp, Artificial
  primer
tcgtccagaacagcggttggcttta

SEQ ID NO: 3419 - DNA, 25 bp, Artificial
  primer
attgcatgaaggtactggtcctcgt

SEQ ID NO: 3420 - DNA, 25 bp, Artificial
  primer
aggtactggtcctcgtgttatttct

SEQ ID NO: 3421 - DNA, 25 bp, Artificial
  primer
aattcagacaaccggttaccaatcg

SEQ ID NO: 3422 - DNA, 25 bp, Artificial
  primer
acttcgaagagttattggtgccaaa

SEQ ID NO: 3423 - DNA, 25 bp, Artificial
  primer
aaatgatgtgatgaacctccttgaa

SEQ ID NO: 3424 - DNA, 25 bp, Artificial
  primer
gaacctccttgaaagcgctggtttt

SEQ ID NO: 3425 - DNA, 25 bp, Artificial
  primer
gcgctggtttttctcgaagcaatcc

SEQ ID NO: 3426 - DNA, 25 bp, Artificial
  primer
gcaacagcaccagattctcagagat

SEQ ID NO: 3427 - DNA, 25 bp, Artificial
  primer
ccccgcctgtggcattttctatggg

SEQ ID NO: 3428 - DNA, 25 bp, Artificial
  primer
tttctatgggctcaggttacacctt

SEQ ID NO: 3429 - DNA, 25 bp, Artificial
  primer
cagctggtgtttctgtcccaggaac

SEQ ID NO: 3430 - DNA, 25 bp, Artificial
  primer
ctcactctccagcaggaaaccaggt

SEQ ID NO: 3431 - DNA, 25 bp, Artificial
  primer
gaccagggccaatgaaccagggacc

SEQ ID NO: 3432 - DNA, 25 bp, Artificial
  primer
atctttaccagctcagccaacagca

SEQ ID NO: 3433 - DNA, 25 bp, Artificial
  primer
gccaacagcacagtctacaagccag

SEQ ID NO: 3434 - DNA, 25 bp, Artificial
  primer
gctgcaggttcaagctctaactcag

SEQ ID NO: 3435 - DNA, 25 bp, Artificial
  primer
ctaactcagcaacaacaatccccta

SEQ ID NO: 3436 - DNA, 25 bp, Artificial
  primer
cctcaccactctggattccagcagt

SEQ ID NO: 3437 - DNA, 25 bp, Artificial
  primer
tgtttgagccgtcattgcaacctcc

SEQ ID NO: 3438 - DNA, 25 bp, Artificial
  primer
ggtctttatgctttgccatgaggcc

SEQ ID NO: 3439 - DNA, 25 bp, Artificial
  primer
gaggccacattcagctgctatttaa

SEQ ID NO: 3440 - DNA, 25 bp, Artificial
  primer
gaatgctgacttttcctacatttcc

SEQ ID NO: 3441 - DNA, 25 bp, Artificial
  primer
tgacttttcctacatttccagagtt

SEQ ID NO: 3442 - DNA, 25 bp, Artificial
  primer
gagttaggcagtattctacacttaa

SEQ ID NO: 3443 - DNA, 25 bp, Artificial
  primer
tacacttaaagactactactatttt

SEQ ID NO: 3444 - DNA, 25 bp, Artificial
  primer
tcttcacagatttcaagtctctcaa

SEQ ID NO: 3445 - DNA, 25 bp, Artificial
  primer
agatttcaagtctctcaaacatcaa

SEQ ID NO: 3446 - DNA, 25 bp, Artificial
  primer
tcaagacaacttcagcagtcggtac

SEQ ID NO: 3447 - DNA, 25 bp, Artificial
  primer
gcagtcggtacaagtcacatttcat

SEQ ID NO: 3448 - DNA, 25 bp, Artificial
  primer
acaagtcacatttcattttgattga

SEQ ID NO: 3449 - DNA, 25 bp, Artificial
  primer
gagcgtagtgaccatcatgagcctc

SEQ ID NO: 3450 - DNA, 25 bp, Artificial
  primer
gcccaagagtgagatgaccccagag

SEQ ID NO: 3451 - DNA, 25 bp, Artificial
  primer
gaggaatttaacaccggtccactct

SEQ ID NO: 3452 - DNA, 25 bp, Artificial
  primer
cactctctgtgctcacacagtcagt

SEQ ID NO: 3453 - DNA, 25 bp, Artificial
  primer
gaacaatacccaagtgctcatcaac

SEQ ID NO: 3454 - DNA, 25 bp, Artificial
  primer
tgctcatcaactgccgcaacaataa

SEQ ID NO: 3455 - DNA, 25 bp, Artificial
  primer
gaaggccttcgataggcactgcaac

SEQ ID NO: 3456 - DNA, 25 bp, Artificial
  primer
gtggactgaggtacccaagagtggc

SEQ ID NO: 3457 - DNA, 25 bp, Artificial
  primer
acatctccaagatgttcctgcgcgg

SEQ ID NO: 3458 - DNA, 25 bp, Artificial
  primer
tcatcgccggcaagtaggggccgcc

SEQ ID NO: 3459 - DNA, 25 bp, Artificial
  primer
tcctatgaagaccgctgccattggt

SEQ ID NO: 3460 - DNA, 25 bp, Artificial
  primer
gatgttaatgggctctgctcatccc

SEQ ID NO: 3461 - DNA, 25 bp, Artificial
  primer
gggtgggctctgatgcagaactttc

SEQ ID NO: 3462 - DNA, 25 bp, Artificial
  primer
ggaacttgtagccagaatgccctgt

SEQ ID NO: 3463 - DNA, 25 bp, Artificial
  primer
gaatgccctgttcatgctgagcaaa

SEQ ID NO: 3464 - DNA, 25 bp, Artificial
  primer
ttcttcctggagtgccttcattgag

SEQ ID NO: 3465 - DNA, 25 bp, Artificial
  primer
tccactgctactgacccagagggga

SEQ ID NO: 3466 - DNA, 25 bp, Artificial
  primer
tcatgaagacttaactggcccagaa

SEQ ID NO: 3467 - DNA, 25 bp, Artificial
  primer
aaaatctgccactcagggtctggga

SEQ ID NO: 3468 - DNA, 25 bp, Artificial
  primer
gggtctgggatgaaggcttgtcagc

SEQ ID NO: 3469 - DNA, 25 bp, Artificial
  primer
gcttgtcagcacttccagtttagaa

SEQ ID NO: 3470 - DNA, 25 bp, Artificial
  primer
gaaaaggcatcactttcctggatcc

SEQ ID NO: 3471 - DNA, 25 bp, Artificial
  primer
gtaaaccacatcttttttgcacttt

SEQ ID NO: 3472 - DNA, 25 bp, Artificial
  primer
acgtgccgtttaaaccactggatct

SEQ ID NO: 3473 - DNA, 25 bp, Artificial
  primer
accactggatctatctaaatgccga

SEQ ID NO: 3474 - DNA, 25 bp, Artificial
  primer
aatgccgatttgagttcgcgacact

SEQ ID NO: 3475 - DNA, 25 bp, Artificial
  primer
gcgacactatgtactgcgtttttca

SEQ ID NO: 3476 - DNA, 25 bp, Artificial
  primer
tgtactgcgtttttcattcttgtat

SEQ ID NO: 3477 - DNA, 25 bp, Artificial
  primer
tgactatttaatcctttctacttgt

SEQ ID NO: 3478 - DNA, 25 bp, Artificial
  primer
tcctttctacttgtcgctaaatata

SEQ ID NO: 3479 - DNA, 25 bp, Artificial
  primer
gcactaggacgtctgcctttttaag

SEQ ID NO: 3480 - DNA, 25 bp, Artificial
  primer
tttttttgccatccatcctgtgcaa

SEQ ID NO: 3481 - DNA, 25 bp, Artificial
  primer
tccatcctgtgcaatatgccgtgta

SEQ ID NO: 3482 - DNA, 25 bp, Artificial
  primer
gaagtgtcatgattattgcagcaac

SEQ ID NO: 3483 - DNA, 25 bp, Artificial
  primer
agacctgatgtgttagatactgctt

SEQ ID NO: 3484 - DNA, 25 bp, Artificial
  primer
agatactgctttgttacgacctgga

SEQ ID NO: 3485 - DNA, 25 bp, Artificial
  primer
ctccttagaaaacctcgcagcagaa

SEQ ID NO: 3486 - DNA, 25 bp, Artificial
  primer
gcacagaagctgctttgctggctct

SEQ ID NO: 3487 - DNA, 25 bp, Artificial
  primer
ctgctttgctggctctgcaagaaaa

SEQ ID NO: 3488 - DNA, 25 bp, Artificial
  primer
aatggactagacgcaactacagtga

SEQ ID NO: 3489 - DNA, 25 bp, Artificial
  primer
accgtcgttaagttgcaaggacttg

SEQ ID NO: 3490 - DNA, 25 bp, Artificial
  primer
aaatcaccttaaactcttgttcagt

SEQ ID NO: 3491 - DNA, 25 bp, Artificial
  primer
aaatgtgaacttgcctgtcgtttgc

SEQ ID NO: 3492 - DNA, 25 bp, Artificial
  primer
gtcgtttgcaacttcacacttttag

SEQ ID NO: 3493 - DNA, 25 bp, Artificial
  primer
tgaactacgacaagctgagccgctc

SEQ ID NO: 3494 - DNA, 25 bp, Artificial
  primer
gggcatcatccggaagccagacatc

SEQ ID NO: 3495 - DNA, 25 bp, Artificial
  primer
ggaaaacgggcagtctgctctgctg

SEQ ID NO: 3496 - DNA, 25 bp, Artificial
  primer
ctgctctgaccttccagagcccaag

SEQ ID NO: 3497 - DNA, 25 bp, Artificial
  primer
gctgctcccctggaggacagaggga

SEQ ID NO: 3498 - DNA, 25 bp, Artificial
  primer
agagggagacagggctgctccccaa

SEQ ID NO: 3499 - DNA, 25 bp, Artificial
  primer
ccagcatttccagagcagagcctac

SEQ ID NO: 3500 - DNA, 25 bp, Artificial
  primer
gggcagtgactcgacaaaggccaca

SEQ ID NO: 3501 - DNA, 25 bp, Artificial
  primer
aaaggccacaggcagtccaggcctc

SEQ ID NO: 3502 - DNA, 25 bp, Artificial
  primer
tgcagggagacatctgcacccctga

SEQ ID NO: 3503 - DNA, 25 bp, Artificial
  primer
gagttgggcagccaggagtgccccc

SEQ ID NO: 3504 - DNA, 25 bp, Artificial
  primer
tacagagtattcctctcttcacacc

SEQ ID NO: 3505 - DNA, 25 bp, Artificial
  primer
accagccactgttgcagcatgagtt

SEQ ID NO: 3506 - DNA, 25 bp, Artificial
  primer
tgttgcagcatgagttcccagcagc

SEQ ID NO: 3507 - DNA, 25 bp, Artificial
  primer
tcccattctgtgtatgagtcccatt

SEQ ID NO: 3508 - DNA, 25 bp, Artificial
  primer
tctgtgtatgagtcccatttgcctt

SEQ ID NO: 3509 - DNA, 25 bp, Artificial
  primer
gagtcccatttgccttgcaattagc

SEQ ID NO: 3510 - DNA, 25 bp, Artificial
  primer
gaatgtgctatgaagctttctttcc

SEQ ID NO: 3511 - DNA, 25 bp, Artificial
  primer
tttcctacacactctgagtctctga

SEQ ID NO: 3512 - DNA, 25 bp, Artificial
  primer
gctgaaggtcttagtaccagagcta

SEQ ID NO: 3513 - DNA, 25 bp, Artificial
  primer
accagagctagttttcagctgctca

SEQ ID NO: 3514 - DNA, 25 bp, Artificial
  primer
gttttcagctgctcagaattcatct

SEQ ID NO: 3515 - DNA, 25 bp, Artificial
  primer
tacgtcaaagaccgctgctgcagta

SEQ ID NO: 3516 - DNA, 25 bp, Artificial
  primer
gcagtagctgcccagtcaggaatac

SEQ ID NO: 3517 - DNA, 25 bp, Artificial
  primer
gctacacatcatgtccactggtgac

SEQ ID NO: 3518 - DNA, 25 bp, Artificial
  primer
cactggtgaccggctacaaccgtgt

SEQ ID NO: 3519 - DNA, 25 bp, Artificial
  primer
acaaccgtgtgattcttgctgagtt

SEQ ID NO: 3520 - DNA, 25 bp, Artificial
  primer
gcgcctttccatgtatctcatgaaa

SEQ ID NO: 3521 - DNA, 25 bp, Artificial
  primer
gaccagcgtttctgcgcaagttgtt

SEQ ID NO: 3522 - DNA, 25 bp, Artificial
  primer
taaggatggctcagcacttgctcat

SEQ ID NO: 3523 - DNA, 25 bp, Artificial
  primer
ggcttctgggccaaaactgcagtca

SEQ ID NO: 3524 - DNA, 25 bp, Artificial
  primer
gtaatggtgaccaaatgcctccctt

SEQ ID NO: 3525 - DNA, 25 bp, Artificial
  primer
gtgggctactcatgatgggcttgat

SEQ ID NO: 3526 - DNA, 25 bp, Artificial
  primer
ggtcacatgggtttggactgtctca

SEQ ID NO: 3527 - DNA, 25 bp, Artificial
  primer
gtatctgagttgcataccaggcagt

SEQ ID NO: 3528 - DNA, 25 bp, Artificial
  primer
ctaacaggtctgtttggcccattga

SEQ ID NO: 3529 - DNA, 25 bp, Artificial
  primer
ctgtttggcccattgatagatactc

SEQ ID NO: 3530 - DNA, 25 bp, Artificial
  primer
tggtgtctccttctggttatggatt

SEQ ID NO: 3531 - DNA, 25 bp, Artificial
  primer
attttgaccattgattacctttctc

SEQ ID NO: 3532 - DNA, 25 bp, Artificial
  primer
gtctttccttgcttacaaactactt

SEQ ID NO: 3533 - DNA, 25 bp, Artificial
  primer
aactactttcacattgaacagctgt

SEQ ID NO: 3534 - DNA, 25 bp, Artificial
  primer
gtattcattttatgctgcccaagat

SEQ ID NO: 3535 - DNA, 25 bp, Artificial
  primer
gtgattatattactctgtccttgtt

SEQ ID NO: 3536 - DNA, 25 bp, Artificial
  primer
taaagtgctgctgtgtttgactctg

SEQ ID NO: 3537 - DNA, 25 bp, Artificial
  primer
agcgttctcaagagggaagctggga

SEQ ID NO: 3538 - DNA, 25 bp, Artificial
  primer
tgggaacctgaccaaggctacagcc

SEQ ID NO: 3539 - DNA, 25 bp, Artificial
  primer
gaccagaaaagtagcggcggcaggg

SEQ ID NO: 3540 - DNA, 25 bp, Artificial
  primer
gccccagcaagtgtgtgctcagagc

SEQ ID NO: 3541 - DNA, 25 bp, Artificial
  primer
tgctcagagcatctttgttcttcac

SEQ ID NO: 3542 - DNA, 25 bp, Artificial
  primer
caggtgccgagaggggcaggtgcca

SEQ ID NO: 3543 - DNA, 25 bp, Artificial
  primer
cttcatgctcacacaggctatgggg

SEQ ID NO: 3544 - DNA, 25 bp, Artificial
  primer
ctgcaaggggcttgtctctgtggca

SEQ ID NO: 3545 - DNA, 25 bp, Artificial
  primer
tgccagggaggctctggttgtctga

SEQ ID NO: 3546 - DNA, 25 bp, Artificial
  primer
tggttgtctgagcaccatgggggcc

SEQ ID NO: 3547 - DNA, 25 bp, Artificial
  primer
cctgtggcctgtgattatgaataaa

SEQ ID NO: 3548 - DNA, 25 bp, Artificial
  primer
gccattaccaatcgcgaaacccgaa

SEQ ID NO: 3549 - DNA, 25 bp, Artificial
  primer
tgaggaggcggttcatctgtggcca

SEQ ID NO: 3550 - DNA, 25 bp, Artificial
  primer
ggccctgctatatgcgggggcctcg

SEQ ID NO: 3551 - DNA, 25 bp, Artificial
  primer
cggctggagtgagcggcgtggacgc

SEQ ID NO: 3552 - DNA, 25 bp, Artificial
  primer
ttcccttgttgctgcgagagcgaga

SEQ ID NO: 3553 - DNA, 25 bp, Artificial
  primer
taacgtgaacgcggaccaggaggct

SEQ ID NO: 3554 - DNA, 25 bp, Artificial
  primer
ctctgtctcccaggttcaggaaaat

SEQ ID NO: 3555 - DNA, 25 bp, Artificial
  primer
aatctggctggatgacttttctaga

SEQ ID NO: 3556 - DNA, 25 bp, Artificial
  primer
tctgtgaaatgctcttctgtcctga

SEQ ID NO: 3557 - DNA, 25 bp, Artificial
  primer
gcctaatttttctgactcttacgaa

SEQ ID NO: 3558 - DNA, 25 bp, Artificial
  primer
ttgccaacacatacttctactttta

SEQ ID NO: 3559 - DNA, 25 bp, Artificial
  primer
atagatctatcgtgtttaaaaccaa

SEQ ID NO: 3560 - DNA, 25 bp, Artificial
  primer
gaaatcaatggaacccttgcacaaa

SEQ ID NO: 3561 - DNA, 25 bp, Artificial
  primer
aaactgtaataagctcatcaatttc

SEQ ID NO: 3562 - DNA, 25 bp, Artificial
  primer
aatgtgctctgttgtcacaggatgt

SEQ ID NO: 3563 - DNA, 25 bp, Artificial
  primer
atttcctgggaattggtaaacatca

SEQ ID NO: 3564 - DNA, 25 bp, Artificial
  primer
gttcctgatgataacccagtagcaa

SEQ ID NO: 3565 - DNA, 25 bp, Artificial
  primer
gagtggtacaagccttggggactga

SEQ ID NO: 3566 - DNA, 25 bp, Artificial
  primer
aaagaaactcatttttacgctgaat

SEQ ID NO: 3567 - DNA, 25 bp, Artificial
  primer
gcattgggaccagtcatttcctaag

SEQ ID NO: 3568 - DNA, 25 bp, Artificial
  primer
atttcctaagctacatatggccatc

SEQ ID NO: 3569 - DNA, 25 bp, Artificial
  primer
tatggccatcttgacagtgtttttt

SEQ ID NO: 3570 - DNA, 25 bp, Artificial
  primer
tgaggggctaattcccaggggactg

SEQ ID NO: 3571 - DNA, 25 bp, Artificial
  primer
cttccctggtgattcttgatcttca

SEQ ID NO: 3572 - DNA, 25 bp, Artificial
  primer
tcaaagcctcggggatcccaggttt

SEQ ID NO: 3573 - DNA, 25 bp, Artificial
  primer
ggtttccccatgtaactgagacacc

SEQ ID NO: 3574 - DNA, 25 bp, Artificial
  primer
cccctttgattctctaaggagcacg

SEQ ID NO: 3575 - DNA, 25 bp, Artificial
  primer
atgcccctcccaggagtttatggga

SEQ ID NO: 3576 - DNA, 25 bp, Artificial
  primer
gcagcgttactgcctgtgtatagta

SEQ ID NO: 3577 - DNA, 25 bp, Artificial
  primer
cgtgtgtgtgcggtgaagggcggtc

SEQ ID NO: 3578 - DNA, 25 bp, Artificial
  primer
cccaccacctggttaagtctcgagt

SEQ ID NO: 3579 - DNA, 25 bp, Artificial
  primer
aagtctcgagtgaatccagtggccc

SEQ ID NO: 3580 - DNA, 25 bp, Artificial
  primer
gacatccatccatctgtggtgaacc

SEQ ID NO: 3581 - DNA, 25 bp, Artificial
  primer
ctcatctgcgacattgctggctatt

SEQ ID NO: 3582 - DNA, 25 bp, Artificial
  primer
tctgcgacattgctggctattaccc

SEQ ID NO: 3583 - DNA, 25 bp, Artificial
  primer
tggtgacgtggacccgagaggagct

SEQ ID NO: 3584 - DNA, 25 bp, Artificial
  primer
cgtggacccgagaggagctgggtgg

SEQ ID NO: 3585 - DNA, 25 bp, Artificial
  primer
tctccagcctcaggcaaagcgtggc

SEQ ID NO: 3586 - DNA, 25 bp, Artificial
  primer
gcctcaggcaaagcgtggcaggcac

SEQ ID NO: 3587 - DNA, 25 bp, Artificial
  primer
gcaggtgccacttacacctgccagg

SEQ ID NO: 3588 - DNA, 25 bp, Artificial
  primer
cacttacacctgccaggtcacacac

SEQ ID NO: 3589 - DNA, 25 bp, Artificial
  primer
ccatgaagaccgcacagcgcgtgta

SEQ ID NO: 3590 - DNA, 25 bp, Artificial
  primer
ccagctgacctaaagcgacatgaga

SEQ ID NO: 3591 - DNA, 25 bp, Artificial
  primer
aacaacaaccaagccagtttaatgg

SEQ ID NO: 3592 - DNA, 25 bp, Artificial
  primer
gtcacacacatctctctggaggagc

SEQ ID NO: 3593 - DNA, 25 bp, Artificial
  primer
gagcggagaacagccttgggagtca

SEQ ID NO: 3594 - DNA, 25 bp, Artificial
  primer
gaacagccttgggagtcatctttgc

SEQ ID NO: 3595 - DNA, 25 bp, Artificial
  primer
agccttgggagtcatctttgccagc

SEQ ID NO: 3596 - DNA, 25 bp, Artificial
  primer
ggggcttcagagacggcaagcacct

SEQ ID NO: 3597 - DNA, 25 bp, Artificial
  primer
cagagacggcaagcacctacaggac

SEQ ID NO: 3598 - DNA, 25 bp, Artificial
  primer
agcacctacaggacttgggctgctt

SEQ ID NO: 3599 - DNA, 25 bp, Artificial
  primer
gcttcaggctgaacgctgggagacc

SEQ ID NO: 3600 - DNA, 25 bp, Artificial
  primer
caggctgaacgctgggagaccactt

SEQ ID NO: 3601 - DNA, 25 bp, Artificial
  primer
aagcgacatgagactactagaaaga

SEQ ID NO: 3602 - DNA, 25 bp, Artificial
  primer
gactactagaaagaaacgacaccct

SEQ ID NO: 3603 - DNA, 25 bp, Artificial
  primer
cttgctggatttgcattccttacag

SEQ ID NO: 3604 - DNA, 25 bp, Artificial
  primer
ccctgccctggagttttgtattgct

SEQ ID NO: 3605 - DNA, 25 bp, Artificial
  primer
tgtattgctgtcaaccccagcatcc

SEQ ID NO: 3606 - DNA, 25 bp, Artificial
  primer
tcccactgctttcatgggcacagca

SEQ ID NO: 3607 - DNA, 25 bp, Artificial
  primer
agcaatgatctttacctgcttcacc

SEQ ID NO: 3608 - DNA, 25 bp, Artificial
  primer
tgatgtcagccctgagcttgttgct

SEQ ID NO: 3609 - DNA, 25 bp, Artificial
  primer
gggactggtggtcatgtgtggcttc

SEQ ID NO: 3610 - DNA, 25 bp, Artificial
  primer
tatctggcactgcattgatctcttc

SEQ ID NO: 3611 - DNA, 25 bp, Artificial
  primer
gaaaactcatgatgatcctggccat

SEQ ID NO: 3612 - DNA, 25 bp, Artificial
  primer
aaatgaagtgaccatccagcctttc

SEQ ID NO: 3613 - DNA, 25 bp, Artificial
  primer
atttcctttttgcacacattacagg

SEQ ID NO: 3614 - DNA, 25 bp, Artificial
  primer
gacagctacccccagaagggtcaat

SEQ ID NO: 3615 - DNA, 25 bp, Artificial
  primer
gttgggagtggttgtggctctgagc

SEQ ID NO: 3616 - DNA, 25 bp, Artificial
  primer
tgctctacagagcttcagtgtgaga

SEQ ID NO: 3617 - DNA, 25 bp, Artificial
  primer
ttcacaaccagtgcacagtttgaca

SEQ ID NO: 3618 - DNA, 25 bp, Artificial
  primer
ttgacagtggcctcaggttcacagt

SEQ ID NO: 3619 - DNA, 25 bp, Artificial
  primer
agtgcaccatgtcactgtgctatcc

SEQ ID NO: 3620 - DNA, 25 bp, Artificial
  primer
cccgaatggctcactttcactgagg

SEQ ID NO: 3621 - DNA, 25 bp, Artificial
  primer
tgctgtcctctgatttagctgctgc

SEQ ID NO: 3622 - DNA, 25 bp, Artificial
  primer
cagcctctggcttgagaacttacta

SEQ ID NO: 3623 - DNA, 25 bp, Artificial
  primer
gtgattctctgctaggcctaagatt

SEQ ID NO: 3624 - DNA, 25 bp, Artificial
  primer
aacatctcttgaagccaaactccac

SEQ ID NO: 3625 - DNA, 25 bp, Artificial
  primer
gtatagatgatttttggcttggaca

SEQ ID NO: 3626 - DNA, 25 bp, Artificial
  primer
ggacataaaagccaagccacccatt

SEQ ID NO: 3627 - DNA, 25 bp, Artificial
  primer
agccacccatttgcttttaatccaa

SEQ ID NO: 3628 - DNA, 25 bp, Artificial
  primer
gaacatgtatagtttttgtacccag

SEQ ID NO: 3629 - DNA, 25 bp, Artificial
  primer
tattgattgcacttgcctgccatga

SEQ ID NO: 3630 - DNA, 25 bp, Artificial
  primer
gcacttgcctgccatgatttagata

SEQ ID NO: 3631 - DNA, 25 bp, Artificial
  primer
tattctttcctaatggatcctgttt

SEQ ID NO: 3632 - DNA, 25 bp, Artificial
  primer
atacttccaagcctgtccatggata

SEQ ID NO: 3633 - DNA, 25 bp, Artificial
  primer
tgtcttcacttgtatgttttcatgg

SEQ ID NO: 3634 - DNA, 25 bp, Artificial
  primer
atgttttcatggctaggtatttcta

SEQ ID NO: 3635 - DNA, 25 bp, Artificial
  primer
tgtacttctacacatagctatgcac

SEQ ID NO: 3636 - DNA, 25 bp, Artificial
  primer
tgacaggatgggtcctctcatacag

SEQ ID NO: 3637 - DNA, 25 bp, Artificial
  primer
tttttccatctggcgtttctgtgtc

SEQ ID NO: 3638 - DNA, 25 bp, Artificial
  primer
gtttctgtgtcctccaggtttatat

SEQ ID NO: 3639 - DNA, 25 bp, Artificial
  primer
gggagagttccatgggcagatttcc

SEQ ID NO: 3640 - DNA, 25 bp, Artificial
  primer
gaaggccaaaacggagaactgctct

SEQ ID NO: 3641 - DNA, 25 bp, Artificial
  primer
agaccaaaagtttgctcagcatcac

SEQ ID NO: 3642 - DNA, 25 bp, Artificial
  primer
tcagcatcacactacatctcaaaat

SEQ ID NO: 3643 - DNA, 25 bp, Artificial
  primer
tagtttacaaggttgggggctctct

SEQ ID NO: 3644 - DNA, 25 bp, Artificial
  primer
gggctctctttgcttcgagaagtaa

SEQ ID NO: 3645 - DNA, 25 bp, Artificial
  primer
gctgcattcaacgtcaaaattacct

SEQ ID NO: 3646 - DNA, 25 bp, Artificial
  primer
gcaccttgcctgaacatgactttaa

SEQ ID NO: 3647 - DNA, 25 bp, Artificial
  primer
gttcagtacatcatgctcttgtgcc

SEQ ID NO: 3648 - DNA, 25 bp, Artificial
  primer
tttccagggcttcgagcttgatctt

SEQ ID NO: 3649 - DNA, 25 bp, Artificial
  primer
ttgctatatcttctggttttctgaa

SEQ ID NO: 3650 - DNA, 25 bp, Artificial
  primer
ataccctttgtatcactgcattttt

SEQ ID NO: 3651 - DNA, 25 bp, Artificial
  primer
catttttccatatcatctccggttc

SEQ ID NO: 3652 - DNA, 25 bp, Artificial
  primer
ggttcgatcgcgtccagatggaaaa

SEQ ID NO: 3653 - DNA, 25 bp, Artificial
  primer
agcagaggcttctaatcgtcgcatt

SEQ ID NO: 3654 - DNA, 25 bp, Artificial
  primer
cgtcgcatttactggctccagtgca

SEQ ID NO: 3655 - DNA, 25 bp, Artificial
  primer
ctccagtgcaacacatccatctgaa

SEQ ID NO: 3656 - DNA, 25 bp, Artificial
  primer
aacactcggaagtctggtgcttgga

SEQ ID NO: 3657 - DNA, 25 bp, Artificial
  primer
gagagggtgccattgtctcttgtac

SEQ ID NO: 3658 - DNA, 25 bp, Artificial
  primer
gaacatgatgtcacttctactgaat

SEQ ID NO: 3659 - DNA, 25 bp, Artificial
  primer
ctactgaattagatccctttctgac

SEQ ID NO: 3660 - DNA, 25 bp, Artificial
  primer
gatccctttctgacaaacttatctg

SEQ ID NO: 3661 - DNA, 25 bp, Artificial
  primer
gttaatgaatacacccagggcacac

SEQ ID NO: 3662 - DNA, 25 bp, Artificial
  primer
cccagggcacacacggttgaagagg

SEQ ID NO: 3663 - DNA, 25 bp, Artificial
  primer
aacgaagacattctggacaatccat

SEQ ID NO: 3664 - DNA, 25 bp, Artificial
  primer
gaaacactgctggaccagtctttta

SEQ ID NO: 3665 - DNA, 25 bp, Artificial
  primer
gcaacagcaacttgatgctacatcc

SEQ ID NO: 3666 - DNA, 25 bp, Artificial
  primer
tgtatctgttaagtcatcgtcctgc

SEQ ID NO: 3667 - DNA, 25 bp, Artificial
  primer
ttaagtcatcgtcctgcaagcttgg

SEQ ID NO: 3668 - DNA, 25 bp, Artificial
  primer
gcaagcttggcgttactatgtattt

SEQ ID NO: 3669 - DNA, 25 bp, Artificial
  primer
gaagatggttggcggcattgcccag

SEQ ID NO: 3670 - DNA, 25 bp, Artificial
  primer
tggttggcggcattgcccagatcat

SEQ ID NO: 3671 - DNA, 25 bp, Artificial
  primer
tgcccagatcatcgcagcacaggaa

SEQ ID NO: 3672 - DNA, 25 bp, Artificial
  primer
aatgcttcggaaggaacgagagctg

SEQ ID NO: 3673 - DNA, 25 bp, Artificial
  primer
gaagaggcgcggaagaaactggccc

SEQ ID NO: 3674 - DNA, 25 bp, Artificial
  primer
ccggcagcagcagtacaagtttctg

SEQ ID NO: 3675 - DNA, 25 bp, Artificial
  primer
gtacaagtttctgccttcagagctt

SEQ ID NO: 3676 - DNA, 25 bp, Artificial
  primer
gagcttcgagatgagcactaaagaa

SEQ ID NO: 3677 - DNA, 25 bp, Artificial
  primer
cttctatttaatgcagacccggccc

SEQ ID NO: 3678 - DNA, 25 bp, Artificial
  primer
ctccaagagtattattaacgctgct

SEQ ID NO: 3679 - DNA, 25 bp, Artificial
  primer
ttattaacgctgctgtacctcgatc

SEQ ID NO: 3680 - DNA, 25 bp, Artificial
  primer
ttggctcttggtggaattgaattca

SEQ ID NO: 3681 - DNA, 25 bp, Artificial
  primer
gaattgaattcatcttgtgtcttat

SEQ ID NO: 3682 - DNA, 25 bp, Artificial
  primer
attcatcttgtgtcttattcaagta

SEQ ID NO: 3683 - DNA, 25 bp, Artificial
  primer
gtaataaatggagtgcttggaggca

SEQ ID NO: 3684 - DNA, 25 bp, Artificial
  primer
ggagtgcttggaggcatatgtggct

SEQ ID NO: 3685 - DNA, 25 bp, Artificial
  primer
gaggcatatgtggcttttgctgctc

SEQ ID NO: 3686 - DNA, 25 bp, Artificial
  primer
cttttgctgctctcaccaacagcaa

SEQ ID NO: 3687 - DNA, 25 bp, Artificial
  primer
tccccacagtctacttttacaaacg

SEQ ID NO: 3688 - DNA, 25 bp, Artificial
  primer
tttacagactgagtgacagtactca

SEQ ID NO: 3689 - DNA, 25 bp, Artificial
  primer
gagtgacagtactcagtatatctga

SEQ ID NO: 3690 - DNA, 25 bp, Artificial
  primer
tatatctgagataaactctataatg

SEQ ID NO: 3691 - DNA, 25 bp, Artificial
  primer
aaggttacccacattgagctcatac

SEQ ID NO: 3692 - DNA, 25 bp, Artificial
  primer
gagctcataccagtgtgaaacttcc

SEQ ID NO: 3693 - DNA, 25 bp, Artificial
  primer
gaaacttccatggcattatctttta

SEQ ID NO: 3694 - DNA, 25 bp, Artificial
  primer
accccacacaaatgcactcaaagca

SEQ ID NO: 3695 - DNA, 25 bp, Artificial
  primer
aaagcaacccaacatcagtatcctg

SEQ ID NO: 3696 - DNA, 25 bp, Artificial
  primer
tgcagtttctatgggccctttctgc

SEQ ID NO: 3697 - DNA, 25 bp, Artificial
  primer
ttctgcagcctttactcatggaaga

SEQ ID NO: 3698 - DNA, 25 bp, Artificial
  primer
agcattgtccaagccctaagtatgg

SEQ ID NO: 3699 - DNA, 25 bp, Artificial
  primer
gtatggttggcctaagctttgctga

SEQ ID NO: 3700 - DNA, 25 bp, Artificial
  primer
agatcagtctgtttatgtttgctta

SEQ ID NO: 3701 - DNA, 25 bp, Artificial
  primer
aatgtcatcgttatttatcctgatt

SEQ ID NO: 3702 - DNA, 25 bp, Artificial
  primer
tatgactgctaaaagaaccaaccca

SEQ ID NO: 3703 - DNA, 25 bp, Artificial
  primer
aaagaaccaacccaggacagagcca

SEQ ID NO: 3704 - DNA, 25 bp, Artificial
  primer
acccaggacagagccacaatcttcc

SEQ ID NO: 3705 - DNA, 25 bp, Artificial
  primer
caggacagagccacaatcttcctct

SEQ ID NO: 3706 - DNA, 25 bp, Artificial
  primer
acagagccacaatcttcctctattt

SEQ ID NO: 3707 - DNA, 25 bp, Artificial
  primer
tttcacttgtattcatttgtaaaac

SEQ ID NO: 3708 - DNA, 25 bp, Artificial
  primer
tttgtattagtgtaacatactcccc

SEQ ID NO: 3709 - DNA, 25 bp, Artificial
  primer
aaacgcctgtaaagactggcatctt

SEQ ID NO: 3710 - DNA, 25 bp, Artificial
  primer
gcctgtaaagactggcatcttcaca

SEQ ID NO: 3711 - DNA, 25 bp, Artificial
  primer
gactggcatcttcacaggatgtcag

SEQ ID NO: 3712 - DNA, 25 bp, Artificial
  primer
atcttcacaggatgtcagtgtttaa

SEQ ID NO: 3713 - DNA, 25 bp, Artificial
  primer
gatgagggcaaaccagttaaaccta

SEQ ID NO: 3714 - DNA, 25 bp, Artificial
  primer
tccctatcccagactaactttactg

SEQ ID NO: 3715 - DNA, 25 bp, Artificial
  primer
tggattcggggtggattttcgttgt

SEQ ID NO: 3716 - DNA, 25 bp, Artificial
  primer
gtggattttcgttgtccgtggaaga

SEQ ID NO: 3717 - DNA, 25 bp, Artificial
  primer
ggaagaacacatggatctctctggc

SEQ ID NO: 3718 - DNA, 25 bp, Artificial
  primer
ctgccccttaaccttgacgaggata

SEQ ID NO: 3719 - DNA, 25 bp, Artificial
  primer
cccccaaaggatcactgcacagtcc

SEQ ID NO: 3720 - DNA, 25 bp, Artificial
  primer
atcactgcacagtcctactacagta

SEQ ID NO: 3721 - DNA, 25 bp, Artificial
  primer
atatgtgtatagttaccaacctaaa

SEQ ID NO: 3722 - DNA, 25 bp, Artificial
  primer
aaaatccgaacagcatacttgaaga

SEQ ID NO: 3723 - DNA, 25 bp, Artificial
  primer
aatactcaaactctcagtgcttcct

SEQ ID NO: 3724 - DNA, 25 bp, Artificial
  primer
ctacccccacgtggtgtaagcagag

SEQ ID NO: 3725 - DNA, 25 bp, Artificial
  primer
gaattggttcacttaactcccagca

SEQ ID NO: 3726 - DNA, 25 bp, Artificial
  primer
aaacatcctcctgccacttaggagg

SEQ ID NO: 3727 - DNA, 25 bp, Artificial
  primer
aacacctccctatggtaccatttat

SEQ ID NO: 3728 - DNA, 25 bp, Artificial
  primer
agcagaatcagtgcctagcctgtgc

SEQ ID NO: 3729 - DNA, 25 bp, Artificial
  primer
tgagtgacctgcaggccattatcag

SEQ ID NO: 3730 - DNA, 25 bp, Artificial
  primer
gccattatcagtgcctcatctgtgc

SEQ ID NO: 3731 - DNA, 25 bp, Artificial
  primer
gagagggaccatccaaatacctaag

SEQ ID NO: 3732 - DNA, 25 bp, Artificial
  primer
tttcagctgttcccaaaggcctggg

SEQ ID NO: 3733 - DNA, 25 bp, Artificial
  primer
atgtggggcttgattcacccttcat

SEQ ID NO: 3734 - DNA, 25 bp, Artificial
  primer
ttcacccttcatccattggctggaa

SEQ ID NO: 3735 - DNA, 25 bp, Artificial
  primer
aaggcggcatctatgacttcattgg

SEQ ID NO: 3736 - DNA, 25 bp, Artificial
  primer
ccttgtcatgtcccggaatgccggc

SEQ ID NO: 3737 - DNA, 25 bp, Artificial
  primer
tgctgagcttattatgtcccgctgc

SEQ ID NO: 3738 - DNA, 25 bp, Artificial
  primer
agcccggggcattgagtttgactgg

SEQ ID NO: 3739 - DNA, 25 bp, Artificial
  primer
atcagtctgggtccatacatcgtcg

SEQ ID NO: 3740 - DNA, 25 bp, Artificial
  primer
cgcgtctgctcaggtctggatgata

SEQ ID NO: 3741 - DNA, 25 bp, Artificial
  primer
taacacgctatgatctgtaccacac

SEQ ID NO: 3742 - DNA, 25 bp, Artificial
  primer
ctcctgctgatgttcctcagagttt

SEQ ID NO: 3743 - DNA, 25 bp, Artificial
  primer
tatggagacgtttgtccacctatgc

SEQ ID NO: 3744 - DNA, 25 bp, Artificial
  primer
ttgccgttgtcaatgtgcactccta

SEQ ID NO: 3745 - DNA, 25 bp, Artificial
  primer
tcctaggcttggtgtctcagacatt

SEQ ID NO: 3746 - DNA, 25 bp, Artificial
  primer
caccaagccgacctcagagttgttc

SEQ ID NO: 3747 - DNA, 25 bp, Artificial
  primer
agagttgttcatcttccttatggga

SEQ ID NO: 3748 - DNA, 25 bp, Artificial
  primer
tatgggacaaaaccggttgaccaga

SEQ ID NO: 3749 - DNA, 25 bp, Artificial
  primer
gagagatgacctcggaagcatttcc

SEQ ID NO: 3750 - DNA, 25 bp, Artificial
  primer
gcatttccacagatggtgtcagggt

SEQ ID NO: 3751 - DNA, 25 bp, Artificial
  primer
tcccctggaagctttagaatattta

SEQ ID NO: 3752 - DNA, 25 bp, Artificial
  primer
ggattttttttctgtagctcaaagg

SEQ ID NO: 3753 - DNA, 25 bp, Artificial
  primer
attttggtaacacttctctatattt

SEQ ID NO: 3754 - DNA, 25 bp, Artificial
  primer
gcaatgatactaaacaactctctga

SEQ ID NO: 3755 - DNA, 25 bp, Artificial
  primer
aactctctgaaatttctcaagcacc

SEQ ID NO: 3756 - DNA, 25 bp, Artificial
  primer
aacatcattttagcaaaggccagga

SEQ ID NO: 3757 - DNA, 25 bp, Artificial
  primer
gcatttcagtctcaacgcatagata

SEQ ID NO: 3758 - DNA, 25 bp, Artificial
  primer
aaatcctgttcattgaactcccatc

SEQ ID NO: 3759 - DNA, 25 bp, Artificial
  primer
gaactcccatcaactcttatgaaat

SEQ ID NO: 3760 - DNA, 25 bp, Artificial
  primer
tcatgctgatcttcattaccgttgc

SEQ ID NO: 3761 - DNA, 25 bp, Artificial
  primer
ttgtgaccagtttctgtctgcatgt

SEQ ID NO: 3762 - DNA, 25 bp, Artificial
  primer
gtctgcatgtaatttggatttctca

SEQ ID NO: 3763 - DNA, 25 bp, Artificial
  primer
tatttttgttcatctccttatctat

SEQ ID NO: 3764 - DNA, 25 bp, Artificial
  primer
tttgtaatatttgtccactaagctg

SEQ ID NO: 3765 - DNA, 25 bp, Artificial
  primer
aagcagcctcatacagttgattttg

SEQ ID NO: 3766 - DNA, 25 bp, Artificial
  primer
gttgattttgtgtatgtggctagtc

SEQ ID NO: 3767 - DNA, 25 bp, Artificial
  primer
gtggctagtcttattgtcactatgt

SEQ ID NO: 3768 - DNA, 25 bp, Artificial
  primer
gcttaactcttttgacatctgctat

SEQ ID NO: 3769 - DNA, 25 bp, Artificial
  primer
tattgtgacacatcccattgctggc

SEQ ID NO: 3770 - DNA, 25 bp, Artificial
  primer
ggtgcacactccgaaacttttaact

SEQ ID NO: 3771 - DNA, 25 bp, Artificial
  primer
actactgttttgtaagcctccaagg

SEQ ID NO: 3772 - DNA, 25 bp, Artificial
  primer
gcctccaagggtggcattgcagggt

SEQ ID NO: 3773 - DNA, 25 bp, Artificial
  primer
gagaggtgctccaagtgctgtgatt

SEQ ID NO: 3774 - DNA, 25 bp, Artificial
  primer
gagcaccgtgctagaggaactgtaa

SEQ ID NO: 3775 - DNA, 25 bp, Artificial
  primer
atgaagtagcgtggaggccctggac

SEQ ID NO: 3776 - DNA, 25 bp, Artificial
  primer
actgctgctcgttctttaggatgga

SEQ ID NO: 3777 - DNA, 25 bp, Artificial
  primer
ggactgttctggtatctggtattgg

SEQ ID NO: 3778 - DNA, 25 bp, Artificial
  primer
gaagcactctatttctgttttaatg

SEQ ID NO: 3779 - DNA, 25 bp, Artificial
  primer
tctcagccaaatactcatcttttga

SEQ ID NO: 3780 - DNA, 25 bp, Artificial
  primer
ctgaaatcacactggcgggaatgaa

SEQ ID NO: 3781 - DNA, 25 bp, Artificial
  primer
ggcgggaatgaagattgtgccagcc

SEQ ID NO: 3782 - DNA, 25 bp, Artificial
  primer
agcaggaatagggtgtcctcccttc

SEQ ID NO: 3783 - DNA, 25 bp, Artificial
  primer
aagcactttgcttgcattttatttt

SEQ ID NO: 3784 - DNA, 25 bp, Artificial
  primer
gagtccttcatagagctcagtcagg

SEQ ID NO: 3785 - DNA, 25 bp, Artificial
  primer
gggatggggcaccaagccaagcccc

SEQ ID NO: 3786 - DNA, 25 bp, Artificial
  primer
tcctcaggctgtaagcaagagacag

SEQ ID NO: 3787 - DNA, 25 bp, Artificial
  primer
cctgcccaactccaaggactgggta

SEQ ID NO: 3788 - DNA, 25 bp, Artificial
  primer
gggctattggagggtcagtgtctgt

SEQ ID NO: 3789 - DNA, 25 bp, Artificial
  primer
agtgtctgtgactgaataaagttcc

SEQ ID NO: 3790 - DNA, 25 bp, Artificial
  primer
ggtgatcccactgagactctgagac

SEQ ID NO: 3791 - DNA, 25 bp, Artificial
  primer
atgactttgcagacttggtgccctt

SEQ ID NO: 3792 - DNA, 25 bp, Artificial
  primer
actcctgggagccgctcatgaggaa

SEQ ID NO: 3793 - DNA, 25 bp, Artificial
  primer
ggacaccttgtacacgatgctgata

SEQ ID NO: 3794 - DNA, 25 bp, Artificial
  primer
caaaaccgggcgagatgcctctgtc

SEQ ID NO: 3795 - DNA, 25 bp, Artificial
  primer
gaggaccacttgttgagctctggaa

SEQ ID NO: 3796 - DNA, 25 bp, Artificial
  primer
aatgcagactctgccatgtcctaag

SEQ ID NO: 3797 - DNA, 25 bp, Artificial
  primer
caggaagtcagaccttccctggttt

SEQ ID NO: 3798 - DNA, 25 bp, Artificial
  primer
ggaaaaagcccaactggactccagt

SEQ ID NO: 3799 - DNA, 25 bp, Artificial
  primer
ggtactggaagaaactctcccatcc

SEQ ID NO: 3800 - DNA, 25 bp, Artificial
  primer
catcctgtaacttttcactgcactt

SEQ ID NO: 3801 - DNA, 25 bp, Artificial
  primer
gcctgctttacgtattttcttttgt

SEQ ID NO: 3802 - DNA, 25 bp, Artificial
  primer
tgcccctgctcacagtgttttagag

SEQ ID NO: 3803 - DNA, 25 bp, Artificial
  primer
gttttagagatggctttcccagtgt

SEQ ID NO: 3804 - DNA, 25 bp, Artificial
  primer
gtgaggcctggagatagttgctaag

SEQ ID NO: 3805 - DNA, 25 bp, Artificial
  primer
gaaacccgatttatttctcctgaat

SEQ ID NO: 3806 - DNA, 25 bp, Artificial
  primer
aagtttgtgtcgttccttaagcaga

SEQ ID NO: 3807 - DNA, 25 bp, Artificial
  primer
tgaccttacccgctaggtggttaat

SEQ ID NO: 3808 - DNA, 25 bp, Artificial
  primer
ggtggttaatttatccatgctggca

SEQ ID NO: 3809 - DNA, 25 bp, Artificial
  primer
gcagaggcactcaggtacttggtaa

SEQ ID NO: 3810 - DNA, 25 bp, Artificial
  primer
caagttgctgcagcttggcattctt

SEQ ID NO: 3811 - DNA, 25 bp, Artificial
  primer
ttcttcttattctagaggtctctct

SEQ ID NO: 3812 - DNA, 25 bp, Artificial
  primer
agtgagaagatctgcaccgtccagt

SEQ ID NO: 3813 - DNA, 25 bp, Artificial
  primer
tgcaccgtccagttggtgggtaaca

SEQ ID NO: 3814 - DNA, 25 bp, Artificial
  primer
tgcccgcaggtgacatggtcctggg

SEQ ID NO: 3815 - DNA, 25 bp, Artificial
  primer
acatggtcctgggaccagttgccca

SEQ ID NO: 3816 - DNA, 25 bp, Artificial
  primer
cgctggaaggagttcgtgcgcacgc

SEQ ID NO: 3817 - DNA, 25 bp, Artificial
  primer
gctggggctgcgcgaggcagagatc

SEQ ID NO: 3818 - DNA, 25 bp, Artificial
  primer
gcagagatcgaagccgtggaggtgg

SEQ ID NO: 3819 - DNA, 25 bp, Artificial
  primer
cttccgagaccagcagtacgagatg

SEQ ID NO: 3820 - DNA, 25 bp, Artificial
  primer
gccctggagcgcatggggctggacg

SEQ ID NO: 3821 - DNA, 25 bp, Artificial
  primer
gctggacggctgcgtggaagacttg

SEQ ID NO: 3822 - DNA, 25 bp, Artificial
  primer
tgcgtggaagacttgcgcagccgcc

SEQ ID NO: 3823 - DNA, 25 bp, Artificial
  primer
gtagcagctcacataactgggacca

SEQ ID NO: 3824 - DNA, 25 bp, Artificial
  primer
cattgtcttctccaaactccaagaa

SEQ ID NO: 3825 - DNA, 25 bp, Artificial
  primer
tgggccgcaaaataaactcctggga

SEQ ID NO: 3826 - DNA, 25 bp, Artificial
  primer
gggcattcattcctgagcaacttgc

SEQ ID NO: 3827 - DNA, 25 bp, Artificial
  primer
ttttactacatctattcccaaacat

SEQ ID NO: 3828 - DNA, 25 bp, Artificial
  primer
tcccaaacatactttcgatttcagg

SEQ ID NO: 3829 - DNA, 25 bp, Artificial
  primer
aatacacaagttatcctgaccctat

SEQ ID NO: 3830 - DNA, 25 bp, Artificial
  primer
ggactctattccatctatcaagggg

SEQ ID NO: 3831 - DNA, 25 bp, Artificial
  primer
tgagcacttgatagacatggaccat

SEQ ID NO: 3832 - DNA, 25 bp, Artificial
  primer
ggaccatgaagccagttttttcggg

SEQ ID NO: 3833 - DNA, 25 bp, Artificial
  primer
gcctttttagttggctaactgacct

SEQ ID NO: 3834 - DNA, 25 bp, Artificial
  primer
gaaatatatgcttgggctcctaaac

SEQ ID NO: 3835 - DNA, 25 bp, Artificial
  primer
aagtcttttgcagatctccagcaca

SEQ ID NO: 3836 - DNA, 25 bp, Artificial
  primer
gcacaagcctctgctagttgatctc

SEQ ID NO: 3837 - DNA, 25 bp, Artificial
  primer
ggttcacacactggtttccatgtaa

SEQ ID NO: 3838 - DNA, 25 bp, Artificial
  primer
cataccatctcatattcagggcaat

SEQ ID NO: 3839 - DNA, 25 bp, Artificial
  primer
ttcagggcaatatcactcctcatgc

SEQ ID NO: 3840 - DNA, 25 bp, Artificial
  primer
cctcatgctattgtcatcttgccta

SEQ ID NO: 3841 - DNA, 25 bp, Artificial
  primer
gtaaacacctatggccggataacta

SEQ ID NO: 3842 - DNA, 25 bp, Artificial
  primer
gtctgtggcctacattcattccaat

SEQ ID NO: 3843 - DNA, 25 bp, Artificial
  primer
ggtattttttgcatccgtgcgatct

SEQ ID NO: 3844 - DNA, 25 bp, Artificial
  primer
tagccaagtgtttttcatgaccctc

SEQ ID NO: 3845 - DNA, 25 bp, Artificial
  primer
aatcagcaagatatcctcctcatgg

SEQ ID NO: 3846 - DNA, 25 bp, Artificial
  primer
ggtccctttagctctcaaaagcaat

SEQ ID NO: 3847 - DNA, 25 bp, Artificial
  primer
tcctgttctcatttttactgctgtg

SEQ ID NO: 3848 - DNA, 25 bp, Artificial
  primer
catttttactgctgtggttgtgctg

SEQ ID NO: 3849 - DNA, 25 bp, Artificial
  primer
gctgctgaacaatactatcttctca

SEQ ID NO: 3850 - DNA, 25 bp, Artificial
  primer
aattccatgccacaaattcagcaat

SEQ ID NO: 3851 - DNA, 25 bp, Artificial
  primer
actgtaattggatgctgatgtggac

SEQ ID NO: 3852 - DNA, 25 bp, Artificial
  primer
cactcccgaatgtgattgccaccag

SEQ ID NO: 3853 - DNA, 25 bp, Artificial
  primer
gattgccaccagctctttatattgc

SEQ ID NO: 3854 - DNA, 25 bp, Artificial
  primer
gctctttatattgctgctgtggtat

SEQ ID NO: 3855 - DNA, 25 bp, Artificial
  primer
tgcagtcttgtttacagtatgtaca

SEQ ID NO: 3856 - DNA, 25 bp, Artificial
  primer
aactcatgtggacttatgccagtct

SEQ ID NO: 3857 - DNA, 25 bp, Artificial
  primer
ttggttgaacatatcgctttccctt

SEQ ID NO: 3858 - DNA, 25 bp, Artificial
  primer
tcccagtacagtccatctttcaatg

SEQ ID NO: 3859 - DNA, 25 bp, Artificial
  primer
atctttcaatgttgcagcctggttg

SEQ ID NO: 3860 - DNA, 25 bp, Artificial
  primer
ggcaggaatttccaggagatcccca

SEQ ID NO: 3861 - DNA, 25 bp, Artificial
  primer
tccccaagaatgctgccttgtctgt

SEQ ID NO: 3862 - DNA, 25 bp, Artificial
  primer
caaagatggaccatgtgcccttcgg

SEQ ID NO: 3863 - DNA, 25 bp, Artificial
  primer
tttacccctttactctgcaagaatg

SEQ ID NO: 3864 - DNA, 25 bp, Artificial
  primer
aaattctgtctgcctactagtttta

SEQ ID NO: 3865 - DNA, 25 bp, Artificial
  primer
caataaatgtaccttatctccttag

SEQ ID NO: 3866 - DNA, 25 bp, Artificial
  primer
ggctgaaggccataactacatagtg

SEQ ID NO: 3867 - DNA, 25 bp, Artificial
  primer
ggtgaaagtctccgtggtggacaca

SEQ ID NO: 3868 - DNA, 25 bp, Artificial
  primer
gcctctggtctgccaggtgaacggt

SEQ ID NO: 3869 - DNA, 25 bp, Artificial
  primer
aggtgaacggtgcctgggtgcaggc

SEQ ID NO: 3870 - DNA, 25 bp, Artificial
  primer
ggtgcaggctggcattgtgagctgg

SEQ ID NO: 3871 - DNA, 25 bp, Artificial
  primer
ccgccacatcacagcatcagggggc

SEQ ID NO: 3872 - DNA, 25 bp, Artificial
  primer
ctcagagtctgggtaccccaggctc

SEQ ID NO: 3873 - DNA, 25 bp, Artificial
  primer
gctgcacccatctgcggatggtact

SEQ ID NO: 3874 - DNA, 25 bp, Artificial
  primer
ccgcccctgactgatggcaggaatc

SEQ ID NO: 3875 - DNA, 25 bp, Artificial
  primer
ataagttactatttattccgctccg

SEQ ID NO: 3876 - DNA, 25 bp, Artificial
  primer
tccctctcccttgagaagctgagtc

SEQ ID NO: 3877 - DNA, 25 bp, Artificial
  primer
gaagctgagtcttctgcatcagatt

SEQ ID NO: 3878 - DNA, 25 bp, Artificial
  primer
ggtgggacgagcctaatgaagtggt

SEQ ID NO: 3879 - DNA, 25 bp, Artificial
  primer
gaagtggttagtcaacgaccgcacc

SEQ ID NO: 3880 - DNA, 25 bp, Artificial
  primer
gcaccgacccttaagcgttcttaag

SEQ ID NO: 3881 - DNA, 25 bp, Artificial
  primer
aagcgttcttaagacgagagctgtg

SEQ ID NO: 3882 - DNA, 25 bp, Artificial
  primer
gtgaggggaaactacgcaaggagcc

SEQ ID NO: 3883 - DNA, 25 bp, Artificial
  primer
gaatgtggaaatgctgtcacgcctt

SEQ ID NO: 3884 - DNA, 25 bp, Artificial
  primer
tcacgccttatttttctaattcctc

SEQ ID NO: 3885 - DNA, 25 bp, Artificial
  primer
tctaattcctcgatgttgggttttt

SEQ ID NO: 3886 - DNA, 25 bp, Artificial
  primer
ctcttctttatatctcaacttttaa

SEQ ID NO: 3887 - DNA, 25 bp, Artificial
  primer
tctcaacttttaatgctcttcttcc

SEQ ID NO: 3888 - DNA, 25 bp, Artificial
  primer
gaacgaattcattggctcagtattt

SEQ ID NO: 3889 - DNA, 25 bp, Artificial
  primer
cattctatctaaattgtgtgtctgt

SEQ ID NO: 3890 - DNA, 25 bp, Artificial
  primer
gtgtgtctgtttttgaaaggtgtgt

SEQ ID NO: 3891 - DNA, 25 bp, Artificial
  primer
aggtgtgtgctttcaagtaggtggt

SEQ ID NO: 3892 - DNA, 25 bp, Artificial
  primer
tatgcattgtagcagtaatcattta

SEQ ID NO: 3893 - DNA, 25 bp, Artificial
  primer
ggaatgcttttgacatgttttaaca

SEQ ID NO: 3894 - DNA, 25 bp, Artificial
  primer
ttaatggaaatctgttactcaggct

SEQ ID NO: 3895 - DNA, 25 bp, Artificial
  primer
ttagctttttaccctcaactcaagt

SEQ ID NO: 3896 - DNA, 25 bp, Artificial
  primer
agcaggctgttaatttcccatctat

SEQ ID NO: 3897 - DNA, 25 bp, Artificial
  primer
atttcccatctatgaatagcacttt

SEQ ID NO: 3898 - DNA, 25 bp, Artificial
  primer
atgcagcgttatgtggatcattatg

SEQ ID NO: 3899 - DNA, 25 bp, Artificial
  primer
ttgtggttgatactcaagccttgta

SEQ ID NO: 3900 - DNA, 25 bp, Artificial
  primer
cacagattccaatgcaagtcgagag

SEQ ID NO: 3901 - DNA, 25 bp, Artificial
  primer
agtcgagagcgatgtggcgttccat

SEQ ID NO: 3902 - DNA, 25 bp, Artificial
  primer
cctgctgcactaaagatcccgcaga

SEQ ID NO: 3903 - DNA, 25 bp, Artificial
  primer
cgaaaggctgtgtgccccagtttga

SEQ ID NO: 3904 - DNA, 25 bp, Artificial
  primer
gcaggacaatttaaccatcgttgct

SEQ ID NO: 3905 - DNA, 25 bp, Artificial
  primer
cagatatttgggatatgcctggccc

SEQ ID NO: 3906 - DNA, 25 bp, Artificial
  primer
gcctggcccagaatttggttagcga

SEQ ID NO: 3907 - DNA, 25 bp, Artificial
  primer
atcgaagctgtcagggcgagctggt

SEQ ID NO: 3908 - DNA, 25 bp, Artificial
  primer
gctgctgcaagacactggacagacc

SEQ ID NO: 3909 - DNA, 25 bp, Artificial
  primer
cttcgagctgcatggacctaatcac

SEQ ID NO: 3910 - DNA, 25 bp, Artificial
  primer
cacagatgcagcctgcagtctcgcc

SEQ ID NO: 3911 - DNA, 25 bp, Artificial
  primer
ccaccttcattggcaacagcacggc

SEQ ID NO: 3912 - DNA, 25 bp, Artificial
  primer
acagcacggccatccaggagctgtt

SEQ ID NO: 3913 - DNA, 25 bp, Artificial
  primer
caggagctgttcaagcgcatctccg

SEQ ID NO: 3914 - DNA, 25 bp, Artificial
  primer
tgcactggtacacgggcgagggcat

SEQ ID NO: 3915 - DNA, 25 bp, Artificial
  primer
acgagatggagttcaccgaggccga

SEQ ID NO: 3916 - DNA, 25 bp, Artificial
  primer
gtaccagcagtaccaggatgccaca

SEQ ID NO: 3917 - DNA, 25 bp, Artificial
  primer
gggcgagttcgaggaggaggctgag

SEQ ID NO: 3918 - DNA, 25 bp, Artificial
  primer
gaggaggaggtggcctagagccttc

SEQ ID NO: 3919 - DNA, 25 bp, Artificial
  primer
tgtgaactctttattcactcccagc

SEQ ID NO: 3920 - DNA, 25 bp, Artificial
  primer
gtccacatccatgctgtacagacac

SEQ ID NO: 3921 - DNA, 25 bp, Artificial
  primer
gtacagacaccaccattaaagcatt

SEQ ID NO: 3922 - DNA, 25 bp, Artificial
  primer
gcaagtgccgggcttgatgagctcc

SEQ ID NO: 3923 - DNA, 25 bp, Artificial
  primer
agctcccaggtgcagatgggcggcc

SEQ ID NO: 3924 - DNA, 25 bp, Artificial
  primer
gaggtcctgtgcctcatgaacatgg

SEQ ID NO: 3925 - DNA, 25 bp, Artificial
  primer
gaggatgtgcgggacgagtgcagca

SEQ ID NO: 3926 - DNA, 25 bp, Artificial
  primer
gtacgggcttgtcaagtccatcgag

SEQ ID NO: 3927 - DNA, 25 bp, Artificial
  primer
aggtgcccggctgcggaaagatctt

SEQ ID NO: 3928 - DNA, 25 bp, Artificial
  primer
ggagttcacctctgtgtttgactgc

SEQ ID NO: 3929 - DNA, 25 bp, Artificial
  primer
ggccgcaagttcgccaacagagtgg

SEQ ID NO: 3930 - DNA, 25 bp, Artificial
  primer
cacaaaatactgtgaccccgactct

SEQ ID NO: 3931 - DNA, 25 bp, Artificial
  primer
ccgggacttctggtagaggcggctg

SEQ ID NO: 3932 - DNA, 25 bp, Artificial
  primer
gcagaggagtgacagccgcagacac

SEQ ID NO: 3933 - DNA, 25 bp, Artificial
  primer
accaatgttcagcctctgagaccag

SEQ ID NO: 3934 - DNA, 25 bp, Artificial
  primer
aagcagtggccatgaatgttccctc

SEQ ID NO: 3935 - DNA, 25 bp, Artificial
  primer
gaagaagtgtactcacactgcccca

SEQ ID NO: 3936 - DNA, 25 bp, Artificial
  primer
actgccccaacaccagtgagtggaa

SEQ ID NO: 3937 - DNA, 25 bp, Artificial
  primer
tatttataggtctctcatttggttt

SEQ ID NO: 3938 - DNA, 25 bp, Artificial
  primer
cacaaaattaaccattacccacatt

SEQ ID NO: 3939 - DNA, 25 bp, Artificial
  primer
cattcctaccaacaagaagtaacca

SEQ ID NO: 3940 - DNA, 25 bp, Artificial
  primer
tgcagacaacatattagcacattgc

SEQ ID NO: 3941 - DNA, 25 bp, Artificial
  primer
tccatgttcttcccatttatacagg

SEQ ID NO: 3942 - DNA, 25 bp, Artificial
  primer
catttatacaggagcaattcttgca

SEQ ID NO: 3943 - DNA, 25 bp, Artificial
  primer
tccttgctcctcaaatgccttagag

SEQ ID NO: 3944 - DNA, 25 bp, Artificial
  primer
cccccttacaagcatttctggacgg

SEQ ID NO: 3945 - DNA, 25 bp, Artificial
  primer
gctgagagctaatttggcccaaggc

SEQ ID NO: 3946 - DNA, 25 bp, Artificial
  primer
accagaccactgaggagagcctgct

SEQ ID NO: 3947 - DNA, 25 bp, Artificial
  primer
catggcctgcgtggcttggggaaat

SEQ ID NO: 3948 - DNA, 25 bp, Artificial
  primer
gagttggtggataccttctgggctt

SEQ ID NO: 3949 - DNA, 25 bp, Artificial
  primer
ttctgggcttttgaacttgcccctc

SEQ ID NO: 3950 - DNA, 25 bp, Artificial
  primer
ctgtcttacccatttcaagttcaag

SEQ ID NO: 3951 - DNA, 25 bp, Artificial
  primer
ttcaagttcaagcggtgcagcacct

SEQ ID NO: 3952 - DNA, 25 bp, Artificial
  primer
gtgcagcaccttcgaagcatcaatg

SEQ ID NO: 3953 - DNA, 25 bp, Artificial
  primer
aagcatcaatgcacacacctgctgt

SEQ ID NO: 3954 - DNA, 25 bp, Artificial
  primer
gctgttgcttttgatttctggaagg

SEQ ID NO: 3955 - DNA, 25 bp, Artificial
  primer
gaagccctataatcacaggtctgtg

SEQ ID NO: 3956 - DNA, 25 bp, Artificial
  primer
atgaatctcgccagaaaggctcctg

SEQ ID NO: 3957 - DNA, 25 bp, Artificial
  primer
ttctccctgcagccattgtagaaga

SEQ ID NO: 3958 - DNA, 25 bp, Artificial
  primer
tgtagaagatctgctggtccttgca

SEQ ID NO: 3959 - DNA, 25 bp, Artificial
  primer
aagctacagccagaatgtccgtttg

SEQ ID NO: 3960 - DNA, 25 bp, Artificial
  primer
tgtccgtttgaaactcctagctcat

SEQ ID NO: 3961 - DNA, 25 bp, Artificial
  primer
ctagctcatctgtcaccgagcttca

SEQ ID NO: 3962 - DNA, 25 bp, Artificial
  primer
cgagcttcatccgaatgtgccacgg

SEQ ID NO: 3963 - DNA, 25 bp, Artificial
  primer
gcacactttgaccctttgtaggatt

SEQ ID NO: 3964 - DNA, 25 bp, Artificial
  primer
taaagcaccagtctggggtcgcctg

SEQ ID NO: 3965 - DNA, 25 bp, Artificial
  primer
agctcactcagtaatatcctttcaa

SEQ ID NO: 3966 - DNA, 25 bp, Artificial
  primer
gtgtgttgtgtatggactcactccc

SEQ ID NO: 3967 - DNA, 25 bp, Artificial
  primer
cctttacattccccagagccaaggg

SEQ ID NO: 3968 - DNA, 25 bp, Artificial
  primer
gtttgcagttacaggccagttctcc

SEQ ID NO: 3969 - DNA, 25 bp, Artificial
  primer
ttctccagctctccatcttagagag

SEQ ID NO: 3970 - DNA, 25 bp, Artificial
  primer
tgaatccagcagccaactcgaatcc

SEQ ID NO: 3971 - DNA, 25 bp, Artificial
  primer
ccccctagggctcaggcactgaggg

SEQ ID NO: 3972 - DNA, 25 bp, Artificial
  primer
ggagggtaccctatttacaactgag

SEQ ID NO: 3973 - DNA, 25 bp, Artificial
  primer
gagtcagccaagccactgatgggaa

SEQ ID NO: 3974 - DNA, 25 bp, Artificial
  primer
gtatatatcctccagcattcagtcc

SEQ ID NO: 3975 - DNA, 25 bp, Artificial
  primer
ccagggggagccacggaaaccatgt

SEQ ID NO: 3976 - DNA, 25 bp, Artificial
  primer
gaaaccatgttcttgcttaagccat

SEQ ID NO: 3977 - DNA, 25 bp, Artificial
  primer
taaaggtccgattccaagctcaggc

SEQ ID NO: 3978 - DNA, 25 bp, Artificial
  primer
accaaagcaccgtcaatgcctacaa

SEQ ID NO: 3979 - DNA, 25 bp, Artificial
  primer
ctctcccaatgttgctcgtaatgcc

SEQ ID NO: 3980 - DNA, 25 bp, Artificial
  primer
tgagctggtgacctatgacctcatc

SEQ ID NO: 3981 - DNA, 25 bp, Artificial
  primer
gccaacctcatgacagatgacctcc

SEQ ID NO: 3982 - DNA, 25 bp, Artificial
  primer
cctcccctgtagacgtggtcaagac

SEQ ID NO: 3983 - DNA, 25 bp, Artificial
  primer
agacgagatacatgaactctgccct

SEQ ID NO: 3984 - DNA, 25 bp, Artificial
  primer
ctgccctgggccagtacagtagcgc

SEQ ID NO: 3985 - DNA, 25 bp, Artificial
  primer
tacaaagggttcatgccctcctttc

SEQ ID NO: 3986 - DNA, 25 bp, Artificial
  primer
agctgaaacgagccctcatggctgc

SEQ ID NO: 3987 - DNA, 25 bp, Artificial
  primer
gagaggctcccttctgagcctctcc

SEQ ID NO: 3988 - DNA, 25 bp, Artificial
  primer
tctacattctcatctactcattgtc

SEQ ID NO: 3989 - DNA, 25 bp, Artificial
  primer
acattctcatctactcattgtctca

SEQ ID NO: 3990 - DNA, 25 bp, Artificial
  primer
ctcattgtctcagtgctggtggagt

SEQ ID NO: 3991 - DNA, 25 bp, Artificial
  primer
gtctcagtgctggtggagttgacat

SEQ ID NO: 3992 - DNA, 25 bp, Artificial
  primer
agtgctggtggagttgacatttgac

SEQ ID NO: 3993 - DNA, 25 bp, Artificial
  primer
ccgtcccttggaaagttcagccaga

SEQ ID NO: 3994 - DNA, 25 bp, Artificial
  primer
gaaagttcagccagaatcttcgtcc

SEQ ID NO: 3995 - DNA, 25 bp, Artificial
  primer
aagttcagccagaatcttcgtcctg

SEQ ID NO: 3996 - DNA, 25 bp, Artificial
  primer
tagcccacttgtcatccataaagca

SEQ ID NO: 3997 - DNA, 25 bp, Artificial
  primer
agcccacttgtcatccataaagcaa

SEQ ID NO: 3998 - DNA, 25 bp, Artificial
  primer
gtcatccataaagcaagctcaacct

SEQ ID NO: 3999 - DNA, 25 bp, Artificial
  primer
aatgagatatctacaaggcacttaa

SEQ ID NO: 4000 - DNA, 25 bp, Artificial
  primer
gtgttacagatgttttaccttaaga

SEQ ID NO: 4001 - DNA, 25 bp, Artificial
  primer
gacagttttcagtgtaccgtaaatg

SEQ ID NO: 4002 - DNA, 25 bp, Artificial
  primer
gtaccgtaaatgttgtgttttcaga

SEQ ID NO: 4003 - DNA, 25 bp, Artificial
  primer
gatggtgctgactggttttctgtat

SEQ ID NO: 4004 - DNA, 25 bp, Artificial
  primer
attgcacaacagtcctcaaatacac

SEQ ID NO: 4005 - DNA, 25 bp, Artificial
  primer
aactattcatacatcaagcagcatt

SEQ ID NO: 4006 - DNA, 25 bp, Artificial
  primer
ttttcactctccttagaattggaac

SEQ ID NO: 4007 - DNA, 25 bp, Artificial
  primer
aatgcttttcaaaatatctgtcttt

SEQ ID NO: 4008 - DNA, 25 bp, Artificial
  primer
atctgtctttggtagtgcttctgct

SEQ ID NO: 4009 - DNA, 25 bp, Artificial
  primer
ctgctgccaccaaattgataagatg

SEQ ID NO: 4010 - DNA, 25 bp, Artificial
  primer
gagaggcaaacccctgtttgtgcgt

SEQ ID NO: 4011 - DNA, 25 bp, Artificial
  primer
ctgtttgtgcgtcatagaacccaga

SEQ ID NO: 4012 - DNA, 25 bp, Artificial
  primer
ggacccacagcatgatctagatcga

SEQ ID NO: 4013 - DNA, 25 bp, Artificial
  primer
gataggtgtttgcactcatcttggc

SEQ ID NO: 4014 - DNA, 25 bp, Artificial
  primer
tcatcttggctgtgtacccattgca

SEQ ID NO: 4015 - DNA, 25 bp, Artificial
  primer
ttttggtggttattactgcccttgc

SEQ ID NO: 4016 - DNA, 25 bp, Artificial
  primer
gggtcacactatgatgcatctggca

SEQ ID NO: 4017 - DNA, 25 bp, Artificial
  primer
caggatcagattgggtcctgctcct

SEQ ID NO: 4018 - DNA, 25 bp, Artificial
  primer
tgaagtccccacgtatgagttcacc

SEQ ID NO: 4019 - DNA, 25 bp, Artificial
  primer
ggactcaagtcataggcttctttca

SEQ ID NO: 4020 - DNA, 25 bp, Artificial
  primer
ggcttctttcagtctttatgtcacc

SEQ ID NO: 4021 - DNA, 25 bp, Artificial
  primer
gctcgtgttgaatctagaaccgtag

SEQ ID NO: 4022 - DNA, 25 bp, Artificial
  primer
agaaccgtagccagacatgggactg

SEQ ID NO: 4023 - DNA, 25 bp, Artificial
  primer
gacatgggactggaggacgagcaaa

SEQ ID NO: 4024 - DNA, 25 bp, Artificial
  primer
gatgcttaccgaatccggagatcct

SEQ ID NO: 4025 - DNA, 25 bp, Artificial
  primer
gatcccctaacaacagtgagagagc

SEQ ID NO: 4026 - DNA, 25 bp, Artificial
  primer
ggattgcacggaggagctctttgac

SEQ ID NO: 4027 - DNA, 25 bp, Artificial
  primer
agctctttgacttcttgcatgcgag

SEQ ID NO: 4028 - DNA, 25 bp, Artificial
  primer
tgcatgcgagggaccattgcgtggc

SEQ ID NO: 4029 - DNA, 25 bp, Artificial
  primer
cattgcgtggcccacaaactcttta

SEQ ID NO: 4030 - DNA, 25 bp, Artificial
  primer
tggcccacaaactctttaacaactt

SEQ ID NO: 4031 - DNA, 25 bp, Artificial
  primer
gtaattcgcaatgattccatctaaa

SEQ ID NO: 4032 - DNA, 25 bp, Artificial
  primer
ttggttcagttttccggagggcgag

SEQ ID NO: 4033 - DNA, 25 bp, Artificial
  primer
tgggccgcgagtttgggaatctgac

SEQ ID NO: 4034 - DNA, 25 bp, Artificial
  primer
gaatctgacgcggatgcggcatgtg

SEQ ID NO: 4035 - DNA, 25 bp, Artificial
  primer
gtgatcagctacagcttgtcaccgt

SEQ ID NO: 4036 - DNA, 25 bp, Artificial
  primer
ctatccgcacgtcttcactaaagga

SEQ ID NO: 4037 - DNA, 25 bp, Artificial
  primer
taaaggaatccccaatgttctgcgc

SEQ ID NO: 4038 - DNA, 25 bp, Artificial
  primer
cgcattcgggagtctttctttcgcg

SEQ ID NO: 4039 - DNA, 25 bp, Artificial
  primer
tggtgccgcagtttgtagtgtttta

SEQ ID NO: 4040 - DNA, 25 bp, Artificial
  primer
agaggaggatccagctgcctatgaa

SEQ ID NO: 4041 - DNA, 25 bp, Artificial
  primer
aaatgagcaacgcatccggatgacg

SEQ ID NO: 4042 - DNA, 25 bp, Artificial
  primer
tgtctctgaaagacctttctctgga

SEQ ID NO: 4043 - DNA, 25 bp, Artificial
  primer
gacaggaaccaggaggcttgggaac

SEQ ID NO: 4044 - DNA, 25 bp, Artificial
  primer
tattatgtgggtcttggggcctcta

SEQ ID NO: 4045 - DNA, 25 bp, Artificial
  primer
ggggcctctaaccatcagtataggg

SEQ ID NO: 4046 - DNA, 25 bp, Artificial
  primer
tttttctttccttgatggcagtaga

SEQ ID NO: 4047 - DNA, 25 bp, Artificial
  primer
gcagtagaaagacctcattttcata

SEQ ID NO: 4048 - DNA, 25 bp, Artificial
  primer
agacctcattttcataacataacta

SEQ ID NO: 4049 - DNA, 25 bp, Artificial
  primer
acataactactcttgatactttctt

SEQ ID NO: 4050 - DNA, 25 bp, Artificial
  primer
gattctatcatgaggtatttggctg

SEQ ID NO: 4051 - DNA, 25 bp, Artificial
  primer
tgaggtatttggctgggagctggga

SEQ ID NO: 4052 - DNA, 25 bp, Artificial
  primer
cttcagtctccctgtcttgtaaaat

SEQ ID NO: 4053 - DNA, 25 bp, Artificial
  primer
ggttcttgaagaaggcactatataa

SEQ ID NO: 4054 - DNA, 25 bp, Artificial
  primer
tctcactttgaggcacatttacatc

SEQ ID NO: 4055 - DNA, 25 bp, Artificial
  primer
tacatcaatgcttttgttcctctca

SEQ ID NO: 4056 - DNA, 25 bp, Artificial
  primer
aagcaagatgtgttccttattgtga

SEQ ID NO: 4057 - DNA, 25 bp, Artificial
  primer
gtgaagagcgacacaactgcctgct

SEQ ID NO: 4058 - DNA, 25 bp, Artificial
  primer
gctgcctttccacagctataatgga

SEQ ID NO: 4059 - DNA, 25 bp, Artificial
  primer
tggacatcaggttgactctaaatca

SEQ ID NO: 4060 - DNA, 25 bp, Artificial
  primer
gtgtgcacaatacttgtggcccaca

SEQ ID NO: 4061 - DNA, 25 bp, Artificial
  primer
gaccaggtaattactgcttgtctct

SEQ ID NO: 4062 - DNA, 25 bp, Artificial
  primer
ttactgcttgtctctcaaggctgct

SEQ ID NO: 4063 - DNA, 25 bp, Artificial
  primer
tcaaggctgctgtctttatcagcac

SEQ ID NO: 4064 - DNA, 25 bp, Artificial
  primer
ggttcagttgtacttgtcctgcaaa

SEQ ID NO: 4065 - DNA, 25 bp, Artificial
  primer
aaacattcatcctcttactgcaagt

SEQ ID NO: 4066 - DNA, 25 bp, Artificial
  primer
tatctgggtacttttacctgtgtgt

SEQ ID NO: 4067 - DNA, 25 bp, Artificial
  primer
aaggcatttcttttcagcagtgatc

SEQ ID NO: 4068 - DNA, 25 bp, Artificial
  primer
tgacggatttacttacagggcctta

SEQ ID NO: 4069 - DNA, 25 bp, Artificial
  primer
gccttaatgttattttgtcccagcc

SEQ ID NO: 4070 - DNA, 25 bp, Artificial
  primer
caccctctaggtcctaaaagtcaag

SEQ ID NO: 4071 - DNA, 25 bp, Artificial
  primer
cctgggcccaacagtttgtacttca

SEQ ID NO: 4072 - DNA, 25 bp, Artificial
  primer
attataacctttcagcacattccaa

SEQ ID NO: 4073 - DNA, 25 bp, Artificial
  primer
cattccaaggttttagttactcagg

SEQ ID NO: 4074 - DNA, 25 bp, Artificial
  primer
attattatgaaccttcagcctactt

SEQ ID NO: 4075 - DNA, 25 bp, Artificial
  primer
agcctactttcttgagtgccgtaaa

SEQ ID NO: 4076 - DNA, 25 bp, Artificial
  primer
caaaaacaggtgccctcatcgtggt

SEQ ID NO: 4077 - DNA, 25 bp, Artificial
  primer
gtcccgtctctatggtggttgagga

SEQ ID NO: 4078 - DNA, 25 bp, Artificial
  primer
aaaaatccaagcacattccccttgc

SEQ ID NO: 4079 - DNA, 25 bp, Artificial
  primer
gccctactgccttctcaaagcagag

SEQ ID NO: 4080 - DNA, 25 bp, Artificial
  primer
ggatggtcaggacctgggccattgc

SEQ ID NO: 4081 - DNA, 25 bp, Artificial
  primer
ggtagggaggtcactccctctactc

SEQ ID NO: 4082 - DNA, 25 bp, Artificial
  primer
ctccctctactcactgagctaggat

SEQ ID NO: 4083 - DNA, 25 bp, Artificial
  primer
tagggagggttattgccccaaccat

SEQ ID NO: 4084 - DNA, 25 bp, Artificial
  primer
gaggtggagggacaggctcagcctc

SEQ ID NO: 4085 - DNA, 25 bp, Artificial
  primer
gtgaagtgcgatttctgcttttgtg

SEQ ID NO: 4086 - DNA, 25 bp, Artificial
  primer
ccattaccacagctgcctttgtgtg

SEQ ID NO: 4087 - DNA, 25 bp, Artificial
  primer
atttcttcatctattcctgtactaa

SEQ ID NO: 4088 - DNA, 25 bp, Artificial
  primer
agaatttggggctctcttcatgcct

SEQ ID NO: 4089 - DNA, 25 bp, Artificial
  primer
caactgagaattctcccagctgcct

SEQ ID NO: 4090 - DNA, 25 bp, Artificial
  primer
gcctgaaagcgtcgccaactgtggt

SEQ ID NO: 4091 - DNA, 25 bp, Artificial
  primer
gcaagctgctacctgcaacttggac

SEQ ID NO: 4092 - DNA, 25 bp, Artificial
  primer
aacttggacgttgtttccacgtgct

SEQ ID NO: 4093 - DNA, 25 bp, Artificial
  primer
ctggctacgattcttgcattctggg

SEQ ID NO: 4094 - DNA, 25 bp, Artificial
  primer
ggcttttttctgtgtcatcaactat

SEQ ID NO: 4095 - DNA, 25 bp, Artificial
  primer
agcaggctgatgtcctgcaccatta

SEQ ID NO: 4096 - DNA, 25 bp, Artificial
  primer
ttctgtgtgctgtgacgactgtcaa

SEQ ID NO: 4097 - DNA, 25 bp, Artificial
  primer
agtatctggccatggcggacactca

SEQ ID NO: 4098 - DNA, 25 bp, Artificial
  primer
gcgctgagtcctgtgcaacatggaa

SEQ ID NO: 4099 - DNA, 25 bp, Artificial
  primer
agctatacacaattcccaaactcat

SEQ ID NO: 4100 - DNA, 25 bp, Artificial
  primer
gattttaccagtccagatatattca

SEQ ID NO: 4101 - DNA, 25 bp, Artificial
  primer
acacttccacagtcagcacggggat

SEQ ID NO: 4102 - DNA, 25 bp, Artificial
  primer
tcagcacggggatcacagacttaga

SEQ ID NO: 4103 - DNA, 25 bp, Artificial
  primer
tggactttggcctacaatttcccag

SEQ ID NO: 4104 - DNA, 25 bp, Artificial
  primer
atttcccagtttactcttagtgaag

SEQ ID NO: 4105 - DNA, 25 bp, Artificial
  primer
tattatcgcatcatcatacctgtcc

SEQ ID NO: 4106 - DNA, 25 bp, Artificial
  primer
catacctgtccttttgatgttagta

SEQ ID NO: 4107 - DNA, 25 bp, Artificial
  primer
ttccagctcttcaccgaaatgttgt

SEQ ID NO: 4108 - DNA, 25 bp, Artificial
  primer
cttatttcagtgtttccttccagac

SEQ ID NO: 4109 - DNA, 25 bp, Artificial
  primer
ggacgtgtctttcatgtacctgacc

SEQ ID NO: 4110 - DNA, 25 bp, Artificial
  primer
ggacgacgacaagctcgagcagatc

SEQ ID NO: 4111 - DNA, 25 bp, Artificial
  primer
gaaggattacaccagcggagccatg

SEQ ID NO: 4112 - DNA, 25 bp, Artificial
  primer
gagccatgctcaccggtgagctcaa

SEQ ID NO: 4113 - DNA, 25 bp, Artificial
  primer
catagaggttctgcagcccttgatc

SEQ ID NO: 4114 - DNA, 25 bp, Artificial
  primer
gtccttcgactttcagtagcactcg

SEQ ID NO: 4115 - DNA, 25 bp, Artificial
  primer
tcaataatcccagcccagtcaaagc

SEQ ID NO: 4116 - DNA, 25 bp, Artificial
  primer
acctgtaggcttctgtctcatggta

SEQ ID NO: 4117 - DNA, 25 bp, Artificial
  primer
gtttcttcctgtgagttccattatt

SEQ ID NO: 4118 - DNA, 25 bp, Artificial
  primer
caaagcagccccacagtggagcctt

SEQ ID NO: 4119 - DNA, 25 bp, Artificial
  primer
gtggagccttcggctggaagtccat

SEQ ID NO: 4120 - DNA, 25 bp, Artificial
  primer
ggctctcactatctgtcaggggagg

SEQ ID NO: 4121 - DNA, 25 bp, Artificial
  primer
gcaaagccggaattctgtgttgaac

SEQ ID NO: 4122 - DNA, 25 bp, Artificial
  primer
tgaacagatgtctgtctccctagtg

SEQ ID NO: 4123 - DNA, 25 bp, Artificial
  primer
agtgtgtgactcacaccttgtggct

SEQ ID NO: 4124 - DNA, 25 bp, Artificial
  primer
cgccacctccagatcagatggggac

SEQ ID NO: 4125 - DNA, 25 bp, Artificial
  primer
gacacacaacccctggatatgtttc

SEQ ID NO: 4126 - DNA, 25 bp, Artificial
  primer
gttgcctgtcagtgtttacaaacta

SEQ ID NO: 4127 - DNA, 25 bp, Artificial
  primer
tgacggcaccgtgtccaagttttta

SEQ ID NO: 4128 - DNA, 25 bp, Artificial
  primer
tttagaacccttgttagccagaccg

SEQ ID NO: 4129 - DNA, 25 bp, Artificial
  primer
tagccagaccgaggtgtcctggtca

SEQ ID NO: 4130 - DNA, 25 bp, Artificial
  primer
accatcatgctttgatgttcccctg

SEQ ID NO: 4131 - DNA, 25 bp, Artificial
  primer
gatggctcggtgcggatgtttgacc

SEQ ID NO: 4132 - DNA, 25 bp, Artificial
  primer
acagcaccatcatttacgaagaccc

SEQ ID NO: 4133 - DNA, 25 bp, Artificial
  primer
catttacgaagacccacagcatcac

SEQ ID NO: 4134 - DNA, 25 bp, Artificial
  primer
tgcttcgcctctgctggaacaagca

SEQ ID NO: 4135 - DNA, 25 bp, Artificial
  primer
gagatcaacaatgtgcagtgggcat

SEQ ID NO: 4136 - DNA, 25 bp, Artificial
  primer
cagtgggcatcaactcagcccgact

SEQ ID NO: 4137 - DNA, 25 bp, Artificial
  primer
ccatctgctacaacaactgcctgga

SEQ ID NO: 4138 - DNA, 25 bp, Artificial
  primer
ctgcctggagatactcagagtgtag

SEQ ID NO: 4139 - DNA, 25 bp, Artificial
  primer
agagtgtagtgttggtggcgctgtg

SEQ ID NO: 4140 - DNA, 25 bp, Artificial
  primer
tgtgcccacgaggcaggggcttttg

SEQ ID NO: 4141 - DNA, 25 bp, Artificial
  primer
gcaggggcttttgtatttcctgcct

SEQ ID NO: 4142 - DNA, 25 bp, Artificial
  primer
ttattgcaagcctggaacctcacgt

SEQ ID NO: 4143 - DNA, 25 bp, Artificial
  primer
gaacctcacgtcatcatgtatattc

SEQ ID NO: 4144 - DNA, 25 bp, Artificial
  primer
acttactgcacttgacaccatggta

SEQ ID NO: 4145 - DNA, 25 bp, Artificial
  primer
ccatggtatgcacaggctgctgctc

SEQ ID NO: 4146 - DNA, 25 bp, Artificial
  primer
gaccacattgtgacatacctcttca

SEQ ID NO: 4147 - DNA, 25 bp, Artificial
  primer
ttcaagcagctgtcacgtagcacca

SEQ ID NO: 4148 - DNA, 25 bp, Artificial
  primer
accacacccctgaaccaggagagcg

SEQ ID NO: 4149 - DNA, 25 bp, Artificial
  primer
gctgtccacggtgctgaacatcatc

SEQ ID NO: 4150 - DNA, 25 bp, Artificial
  primer
tcccgaccactacttggcttgatat

SEQ ID NO: 4151 - DNA, 25 bp, Artificial
  primer
gccagccaccggagaagcagcaggc

SEQ ID NO: 4152 - DNA, 25 bp, Artificial
  primer
cctgtcagcattccgtcgagaagtc

SEQ ID NO: 4153 - DNA, 25 bp, Artificial
  primer
attcctgttactgtattaacccttg

SEQ ID NO: 4154 - DNA, 25 bp, Artificial
  primer
ggaactctaagccatgccagaacac

SEQ ID NO: 4155 - DNA, 25 bp, Artificial
  primer
ccctagccccttgcagtgataaata

SEQ ID NO: 4156 - DNA, 25 bp, Artificial
  primer
gtgtttggtgttcttatctccaccc

SEQ ID NO: 4157 - DNA, 25 bp, Artificial
  primer
tcagacagatgcctcttgcttttaa

SEQ ID NO: 4158 - DNA, 25 bp, Artificial
  primer
acgtgttgtagggttcttggtctgt

SEQ ID NO: 4159 - DNA, 25 bp, Artificial
  primer
gagaaggaagtgagcccactgctct

SEQ ID NO: 4160 - DNA, 25 bp, Artificial
  primer
atgtgggtgagtccaccagaggccc

SEQ ID NO: 4161 - DNA, 25 bp, Artificial
  primer
ccagccctcgaggcagtgtgtgtgg

SEQ ID NO: 4162 - DNA, 25 bp, Artificial
  primer
atatgtaccctgcactcatgaatgt

SEQ ID NO: 4163 - DNA, 25 bp, Artificial
  primer
gaagtatttaacattctcccatccc

SEQ ID NO: 4164 - DNA, 25 bp, Artificial
  primer
taaccccaggaagtaccttcgcagt

SEQ ID NO: 4165 - DNA, 25 bp, Artificial
  primer
gcggaggcagcaaatgttacaggtc

SEQ ID NO: 4166 - DNA, 25 bp, Artificial
  primer
ggtggtgttccagttcaaggcagta

SEQ ID NO: 4167 - DNA, 25 bp, Artificial
  primer
gcagaccgtaaccattatagacgct

SEQ ID NO: 4168 - DNA, 25 bp, Artificial
  primer
gacgctatccacgtcgtaggggtcc

SEQ ID NO: 4169 - DNA, 25 bp, Artificial
  primer
gagggatcggagagtgctcccgaag

SEQ ID NO: 4170 - DNA, 25 bp, Artificial
  primer
gttcccaccttactacatgcggaga

SEQ ID NO: 4171 - DNA, 25 bp, Artificial
  primer
ctatgggcgtcgaccacagtattcc

SEQ ID NO: 4172 - DNA, 25 bp, Artificial
  primer
ttccaaccctcctgtgcagggagaa

SEQ ID NO: 4173 - DNA, 25 bp, Artificial
  primer
gggtgctgacaaccagggtgcagga

SEQ ID NO: 4174 - DNA, 25 bp, Artificial
  primer
gggatatagaccacgattccgcagg

SEQ ID NO: 4175 - DNA, 25 bp, Artificial
  primer
aacttcaattaccgacgcagacgcc

SEQ ID NO: 4176 - DNA, 25 bp, Artificial
  primer
gaaaaccctaaaccacaagatggca

SEQ ID NO: 4177 - DNA, 25 bp, Artificial
  primer
agagacaaaagcagccgatccacca

SEQ ID NO: 4178 - DNA, 25 bp, Artificial
  primer
atccaccagctgagaattcgtccgc

SEQ ID NO: 4179 - DNA, 25 bp, Artificial
  primer
tgagtaaatgccggcttaccatctc

SEQ ID NO: 4180 - DNA, 25 bp, Artificial
  primer
atctctaccatcatccggtttagtc

SEQ ID NO: 4181 - DNA, 25 bp, Artificial
  primer
tcatccggtttagtcatccaacaag

SEQ ID NO: 4182 - DNA, 25 bp, Artificial
  primer
gattggagctgaagacctaaagtgc

SEQ ID NO: 4183 - DNA, 25 bp, Artificial
  primer
cctaaagtgcttgctttttgcccgt

SEQ ID NO: 4184 - DNA, 25 bp, Artificial
  primer
ctttttgcccgttgaccagataaat

SEQ ID NO: 4185 - DNA, 25 bp, Artificial
  primer
gcattatctatgcagcatggggttt

SEQ ID NO: 4186 - DNA, 25 bp, Artificial
  primer
atactcttatagcctgccttcaatt

SEQ ID NO: 4187 - DNA, 25 bp, Artificial
  primer
tattctttctatttgtcaggtgcac

SEQ ID NO: 4188 - DNA, 25 bp, Artificial
  primer
gtcaggtgcacaagattaccttcct

SEQ ID NO: 4189 - DNA, 25 bp, Artificial
  primer
caagattaccttcctgttttagcct

SEQ ID NO: 4190 - DNA, 25 bp, Artificial
  primer
cttgtcaccaaccattcttacttgg

SEQ ID NO: 4191 - DNA, 25 bp, Artificial
  primer
aaccattcttacttggtggccatgt

SEQ ID NO: 4192 - DNA, 25 bp, Artificial
  primer
aaaaaggccgcatgatctttctggc

SEQ ID NO: 4193 - DNA, 25 bp, Artificial
  primer
ctggctccactcagtgtctaaggca

SEQ ID NO: 4194 - DNA, 25 bp, Artificial
  primer
cctcatcctatttactgcagcaaat

SEQ ID NO: 4195 - DNA, 25 bp, Artificial
  primer
gcaaatctctccttagttgatgaga

SEQ ID NO: 4196 - DNA, 25 bp, Artificial
  primer
gatgagactgtgtttatctcccttt

SEQ ID NO: 4197 - DNA, 25 bp, Artificial
  primer
ggagagaagtcctacgagtgctaca

SEQ ID NO: 4198 - DNA, 25 bp, Artificial
  primer
aaagaagttctctcacaagaccctc

SEQ ID NO: 4199 - DNA, 25 bp, Artificial
  primer
ctccgtctgcccagcaaagtttgac

SEQ ID NO: 4200 - DNA, 25 bp, Artificial
  primer
cgagcagttcaacgaccacatgagg

SEQ ID NO: 4201 - DNA, 25 bp, Artificial
  primer
tgaagaactgttttttgcctgctgg

SEQ ID NO: 4202 - DNA, 25 bp, Artificial
  primer
ggtacattacatttccggaggcttg

SEQ ID NO: 4203 - DNA, 25 bp, Artificial
  primer
gaataatagttttcccagtctccct

SEQ ID NO: 4204 - DNA, 25 bp, Artificial
  primer
ccctcggatggtggccttaaggcct

SEQ ID NO: 4205 - DNA, 25 bp, Artificial
  primer
gccttaaggcctggtagtgcttcaa

SEQ ID NO: 4206 - DNA, 25 bp, Artificial
  primer
gaggtccactggttggatctctagc

SEQ ID NO: 4207 - DNA, 25 bp, Artificial
  primer
atctctagctactggcctctaaata

SEQ ID NO: 4208 - DNA, 25 bp, Artificial
  primer
catggtggcatgcttctgtaatccc

SEQ ID NO: 4209 - DNA, 25 bp, Artificial
  primer
atggtggcatgcttctgtaatccca

SEQ ID NO: 4210 - DNA, 25 bp, Artificial
  primer
gctactcaggaggccgagattagag

SEQ ID NO: 4211 - DNA, 25 bp, Artificial
  primer
gaggccgagattagagaatcacttg

SEQ ID NO: 4212 - DNA, 25 bp, Artificial
  primer
gaatcacttgaatgtgggagtcgga

SEQ ID NO: 4213 - DNA, 25 bp, Artificial
  primer
cttgaatgtgggagtcggaggttgt

SEQ ID NO: 4214 - DNA, 25 bp, Artificial
  primer
gaatgtgggagtcggaggttgtaat

SEQ ID NO: 4215 - DNA, 25 bp, Artificial
  primer
gtgggagtcggaggttgtaatgagc

SEQ ID NO: 4216 - DNA, 25 bp, Artificial
  primer
ggagtcggaggttgtaatgagctga

SEQ ID NO: 4217 - DNA, 25 bp, Artificial
  primer
gtcggaggttgtaatgagctgagat

SEQ ID NO: 4218 - DNA, 25 bp, Artificial
  primer
gaggttgtaatgagctgagatcaca

SEQ ID NO: 4219 - DNA, 25 bp, Artificial
  primer
gagtgaaagttgccattattctatg

SEQ ID NO: 4220 - DNA, 25 bp, Artificial
  primer
gagaatgtgccatgtataatttttt

SEQ ID NO: 4221 - DNA, 25 bp, Artificial
  primer
acatccatattgcacaactctactg

SEQ ID NO: 4222 - DNA, 25 bp, Artificial
  primer
aactctactgttgcaaagcttcctt

SEQ ID NO: 4223 - DNA, 25 bp, Artificial
  primer
tccttggaagggggctcttttactg

SEQ ID NO: 4224 - DNA, 25 bp, Artificial
  primer
tactgggttcttaaccagatggttg

SEQ ID NO: 4225 - DNA, 25 bp, Artificial
  primer
ggttgtgtatgggtagcactactaa

SEQ ID NO: 4226 - DNA, 25 bp, Artificial
  primer
gaacttgcagtgtctttcggaattt

SEQ ID NO: 4227 - DNA, 25 bp, Artificial
  primer
attttagttactgaagccttacaag

SEQ ID NO: 4228 - DNA, 25 bp, Artificial
  primer
gagagataccatcttctgtaccaaa

SEQ ID NO: 4229 - DNA, 25 bp, Artificial
  primer
gtaatgtgaatctatgctggtgaaa

SEQ ID NO: 4230 - DNA, 25 bp, Artificial
  primer
ataccaacttgggagatgtcgctaa

SEQ ID NO: 4231 - DNA, 25 bp, Artificial
  primer
gatgtcgctaaaggacttcagtcaa

SEQ ID NO: 4232 - DNA, 25 bp, Artificial
  primer
aatatacaaacgtacaccccatctt

SEQ ID NO: 4233 - DNA, 25 bp, Artificial
  primer
ccatctttaactccacagaccaaga

SEQ ID NO: 4234 - DNA, 25 bp, Artificial
  primer
gaatgtggcaggagacttatttcag

SEQ ID NO: 4235 - DNA, 25 bp, Artificial
  primer
gaatttgcaactcatcatagtcctg

SEQ ID NO: 4236 - DNA, 25 bp, Artificial
  primer
aaggctaatgtcattcttccagtag

SEQ ID NO: 4237 - DNA, 25 bp, Artificial
  primer
gaatcaagcaaatccttccaagaat

SEQ ID NO: 4238 - DNA, 25 bp, Artificial
  primer
atcttgtttgtctccctgtgaaaac

SEQ ID NO: 4239 - DNA, 25 bp, Artificial
  primer
actctttcatctacataatgcacgt

SEQ ID NO: 4240 - DNA, 25 bp, Artificial
  primer
taatgcacgtgttctggatgtataa

SEQ ID NO: 4241 - DNA, 25 bp, Artificial
  primer
gcggcaaagcttttaaccgatcctc

SEQ ID NO: 4242 - DNA, 25 bp, Artificial
  primer
accgatcctcaaaacttactgaaca

SEQ ID NO: 4243 - DNA, 25 bp, Artificial
  primer
gtgacaaggcctttaacctgtcctc

SEQ ID NO: 4244 - DNA, 25 bp, Artificial
  primer
cctgtcctcaacgcttactaaacat

SEQ ID NO: 4245 - DNA, 25 bp, Artificial
  primer
taaacagttctcacaccttgctata

SEQ ID NO: 4246 - DNA, 25 bp, Artificial
  primer
tctcacaccttgctatacataatat

SEQ ID NO: 4247 - DNA, 25 bp, Artificial
  primer
ggcaaagcttttaactcatcctcaa

SEQ ID NO: 4248 - DNA, 25 bp, Artificial
  primer
tcatcctcaaaccttactgcacata

SEQ ID NO: 4249 - DNA, 25 bp, Artificial
  primer
gcaaagctaacctatcatcaaccct

SEQ ID NO: 4250 - DNA, 25 bp, Artificial
  primer
caacccttactccacataagacaat

SEQ ID NO: 4251 - DNA, 25 bp, Artificial
  primer
aatgcttgtaactaaatctcaaact

SEQ ID NO: 4252 - DNA, 25 bp, Artificial
  primer
tggtcccctgcccaggaggaaagtt

SEQ ID NO: 4253 - DNA, 25 bp, Artificial
  primer
tataactcacatcttgttgtccacc

SEQ ID NO: 4254 - DNA, 25 bp, Artificial
  primer
cacatcttgttgtccaccagagagt

SEQ ID NO: 4255 - DNA, 25 bp, Artificial
  primer
aaacagagctcaaacctcggtcagc

SEQ ID NO: 4256 - DNA, 25 bp, Artificial
  primer
aaggccttcagatggggtgctcatc

SEQ ID NO: 4257 - DNA, 25 bp, Artificial
  primer
atggggtgctcatcttgttcagcat

SEQ ID NO: 4258 - DNA, 25 bp, Artificial
  primer
agctcatatctaagtcagcatcgga

SEQ ID NO: 4259 - DNA, 25 bp, Artificial
  primer
ggtgctcagagctcattagacatcg

SEQ ID NO: 4260 - DNA, 25 bp, Artificial
  primer
acatcggagagttcatgccagaaaa

SEQ ID NO: 4261 - DNA, 25 bp, Artificial
  primer
tgccagaaaagagccttcccattga

SEQ ID NO: 4262 - DNA, 25 bp, Artificial
  primer
gaattctacatcggtctaatctact

SEQ ID NO: 4263 - DNA, 25 bp, Artificial
  primer
gataaagcctttagccagtcttcaa

SEQ ID NO: 4264 - DNA, 25 bp, Artificial
  primer
agccagtcttcaactcttactaaac

SEQ ID NO: 4265 - DNA, 25 bp, Artificial
  primer
ggagagaaaccctacaactgtgaag

SEQ ID NO: 4266 - DNA, 25 bp, Artificial
  primer
atacggcaaagctttcaaccagtcc

SEQ ID NO: 4267 - DNA, 25 bp, Artificial
  primer
ttcaaccagtcctcaaaccttattg

SEQ ID NO: 4268 - DNA, 25 bp, Artificial
  primer
attgtggcaaagcctctaacccgtc

SEQ ID NO: 4269 - DNA, 25 bp, Artificial
  primer
cccgtcctgaattcttactaaacat

SEQ ID NO: 4270 - DNA, 25 bp, Artificial
  primer
atggcaaagccttcaacaagtcctc

SEQ ID NO: 4271 - DNA, 25 bp, Artificial
  primer
acaagtcctcaattcttaccagaca

SEQ ID NO: 4272 - DNA, 25 bp, Artificial
  primer
agataattctggctgggtgcggtgg

SEQ ID NO: 4273 - DNA, 25 bp, Artificial
  primer
ggctgagacgggtgaattacatgag

SEQ ID NO: 4274 - DNA, 25 bp, Artificial
  primer
atcttttctaactctgcttagctgc

SEQ ID NO: 4275 - DNA, 25 bp, Artificial
  primer
agctgctaataatcctgaggcatag

SEQ ID NO: 4276 - DNA, 25 bp, Artificial
  primer
tagtgattcacagtatccctcttag

SEQ ID NO: 4277 - DNA, 25 bp, Artificial
  primer
agtatccctcttagcattaatttaa

SEQ ID NO: 4278 - DNA, 25 bp, Artificial
  primer
gaggcagattgattttccctctttc

SEQ ID NO: 4279 - DNA, 25 bp, Artificial
  primer
cccaccatgtccttagatctaatct

SEQ ID NO: 4280 - DNA, 25 bp, Artificial
  primer
tagatctaatctgtgctaccttatt

SEQ ID NO: 4281 - DNA, 25 bp, Artificial
  primer
gctaccttattaactcacagcaggc

SEQ ID NO: 4282 - DNA, 25 bp, Artificial
  primer
acagcaggcttactgaatggcttca

SEQ ID NO: 4283 - DNA, 25 bp, Artificial
  primer
cagatttagttgatttctccaccaa

SEQ ID NO: 4284 - DNA, 25 bp, Artificial
  primer
gcatgtcatgtattctcaataggct

SEQ ID NO: 4285 - DNA, 25 bp, Artificial
  primer
ggctctcactatctgtcaggggagg

SEQ ID NO: 4286 - DNA, 25 bp, Artificial
  primer
gcaaagccggaattctgtgttgaac

SEQ ID NO: 4287 - DNA, 25 bp, Artificial
  primer
tgaacagatgtctgtctccctagtg

SEQ ID NO: 4288 - DNA, 25 bp, Artificial
  primer
agtgtgtgactcacaccttgtggct

SEQ ID NO: 4289 - DNA, 25 bp, Artificial
  primer
cgccacctccagatcagatggggac

SEQ ID NO: 4290 - DNA, 25 bp, Artificial
  primer
gacacacaacccctggatatgtttc

SEQ ID NO: 4291 - DNA, 25 bp, Artificial
  primer
gttgcctgtcagtgtttacaaacta

SEQ ID NO: 4292 - DNA, 25 bp, Artificial
  primer
tgacggcaccgtgtccaagttttta

SEQ ID NO: 4293 - DNA, 25 bp, Artificial
  primer
tttagaacccttgttagccagaccg

SEQ ID NO: 4294 - DNA, 25 bp, Artificial
  primer
tagccagaccgaggtgtcctggtca

SEQ ID NO: 4295 - DNA, 25 bp, Artificial
  primer
accatcatgctttgatgttcccctg

SEQ ID NO: 4296 - DNA, 25 bp, Artificial
  primer
tccagtttactgaactccagaccat

SEQ ID NO: 4297 - DNA, 25 bp, Artificial
  primer
ccagaccatgcatgtagtccactcc

SEQ ID NO: 4298 - DNA, 25 bp, Artificial
  primer
tgcagagtcagggtggcttttcccc

SEQ ID NO: 4299 - DNA, 25 bp, Artificial
  primer
ctgtgtccgatgccaaggagtcctg

SEQ ID NO: 4300 - DNA, 25 bp, Artificial
  primer
ggacgggtggacttagctagggaga

SEQ ID NO: 4301 - DNA, 25 bp, Artificial
  primer
aagtcgaggcagcagccctcgaggc

SEQ ID NO: 4302 - DNA, 25 bp, Artificial
  primer
tcgaggccctcacagatgtctaggc

SEQ ID NO: 4303 - DNA, 25 bp, Artificial
  primer
gtctaggcaggcctcatttcatcac

SEQ ID NO: 4304 - DNA, 25 bp, Artificial
  primer
atttcatcacgcagcatgtgcaggc

SEQ ID NO: 4305 - DNA, 25 bp, Artificial
  primer
atctcagggaagtccttggttgatg

SEQ ID NO: 4306 - DNA, 25 bp, Artificial
  primer
ttggttgatgtatctgggtctcctc

SEQ ID NO: 4307 - DNA, 25 bp, Artificial
  primer
gtggtatggaatcctactgcgttcg

SEQ ID NO: 4308 - DNA, 25 bp, Artificial
  primer
gcgttcgtgcttttgcagatgctat

SEQ ID NO: 4309 - DNA, 25 bp, Artificial
  primer
gtcattccatctacactagctgaaa

SEQ ID NO: 4310 - DNA, 25 bp, Artificial
  primer
ctagctgaaaatgccggcctgaatc

SEQ ID NO: 4311 - DNA, 25 bp, Artificial
  primer
ggcctgaatcccatttctacagtaa

SEQ ID NO: 4312 - DNA, 25 bp, Artificial
  primer
gaactaagaaaccggcatgcccagg

SEQ ID NO: 4313 - DNA, 25 bp, Artificial
  primer
tggaggaactggttgtccagcctct

SEQ ID NO: 4314 - DNA, 25 bp, Artificial
  primer
ccagcctctgttggtatcagtcagt

SEQ ID NO: 4315 - DNA, 25 bp, Artificial
  primer
cagtgctctgactcttgcaactgaa

SEQ ID NO: 4316 - DNA, 25 bp, Artificial
  primer
gactagcaccattatgatcaccagt

SEQ ID NO: 4317 - DNA, 25 bp, Artificial
  primer
tctgggcttggtcttccagttggca

SEQ ID NO: 4318 - DNA, 25 bp, Artificial
  primer
ttggatgctaccactgtactgtcgc

SEQ ID NO: 4319 - DNA, 25 bp, Artificial
  primer
tcgcgtgccattgctgagctgggca

SEQ ID NO: 4320 - DNA, 25 bp, Artificial
  primer
agctgtggatcctctagactccacc

SEQ ID NO: 4321 - DNA, 25 bp, Artificial
  primer
gtgagcattacgatgttgcccgtgg

SEQ ID NO: 4322 - DNA, 25 bp, Artificial
  primer
tcctgcaggactacaaatccctcca

SEQ ID NO: 4323 - DNA, 25 bp, Artificial
  primer
gaagacaagttgaccgtgtcccgtg

SEQ ID NO: 4324 - DNA, 25 bp, Artificial
  primer
ttgtctcagccattccaggttgctg

SEQ ID NO: 4325 - DNA, 25 bp, Artificial
  primer
gaggtcttcacaggtcatatgggga

SEQ ID NO: 4326 - DNA, 25 bp, Artificial
  primer
gaagctggtacccctgaaggagacc

SEQ ID NO: 4327 - DNA, 25 bp, Artificial
  primer
acaggccttctatatggtgggaccc

SEQ ID NO: 4328 - DNA, 25 bp, Artificial
  primer
tcgtgaggggtctttgtcctctgta

SEQ ID NO: 4329 - DNA, 25 bp, Artificial
  primer
gatgttaatgggctctgctcatccc

SEQ ID NO: 4330 - DNA, 25 bp, Artificial
  primer
gggtgggctctgatgcagaactttc

SEQ ID NO: 4331 - DNA, 25 bp, Artificial
  primer
ggaacttgtagccagaatgccctgt

SEQ ID NO: 4332 - DNA, 25 bp, Artificial
  primer
gaatgccctgttcatgctgagcaaa

SEQ ID NO: 4333 - DNA, 25 bp, Artificial
  primer
ttcttcctggagtgccttcattgag

SEQ ID NO: 4334 - DNA, 25 bp, Artificial
  primer
tccactgctactgacccagagggga

SEQ ID NO: 4335 - DNA, 25 bp, Artificial
  primer
tcatgaagacttaactggcccagaa

SEQ ID NO: 4336 - DNA, 25 bp, Artificial
  primer
aaaatctgccactcagggtctggga

SEQ ID NO: 4337 - DNA, 25 bp, Artificial
  primer
gggtctgggatgaaggcttgtcagc

SEQ ID NO: 4338 - DNA, 25 bp, Artificial
  primer
gcttgtcagcacttccagtttagaa

SEQ ID NO: 4339 - DNA, 25 bp, Artificial
  primer
gaaaaggcatcactttcctggatcc

SEQ ID NO: 4340 - DNA, 25 bp, Artificial
  primer
gtgtgttgtgtatggactcactccc

SEQ ID NO: 4341 - DNA, 25 bp, Artificial
  primer
cctttacattccccagagccaaggg

SEQ ID NO: 4342 - DNA, 25 bp, Artificial
  primer
gtttgcagttacaggccagttctcc

SEQ ID NO: 4343 - DNA, 25 bp, Artificial
  primer
ttctccagctctccatcttagagag

SEQ ID NO: 4344 - DNA, 25 bp, Artificial
  primer
tgaatccagcagccaactcgaatcc

SEQ ID NO: 4345 - DNA, 25 bp, Artificial
  primer
ccccctagggctcaggcactgaggg

SEQ ID NO: 4346 - DNA, 25 bp, Artificial
  primer
ggagggtaccctatttacaactgag

SEQ ID NO: 4347 - DNA, 25 bp, Artificial
  primer
gagtcagccaagccactgatgggaa

SEQ ID NO: 4348 - DNA, 25 bp, Artificial
  primer
gtatatatcctccagcattcagtcc

SEQ ID NO: 4349 - DNA, 25 bp, Artificial
  primer
ccagggggagccacggaaaccatgt

SEQ ID NO: 4350 - DNA, 25 bp, Artificial
  primer
gaaaccatgttcttgcttaagccat

SEQ ID NO: 4351 - DNA, 25 bp, Artificial
  primer
caacacctgatccccaagattgaag

SEQ ID NO: 4352 - DNA, 25 bp, Artificial
  primer
ggggtagcaatccaggagaaggtgc

SEQ ID NO: 4353 - DNA, 25 bp, Artificial
  primer
gagagggtgaatgccgtcaagacca

SEQ ID NO: 4354 - DNA, 25 bp, Artificial
  primer
gaagctttccagacaaccatttcca

SEQ ID NO: 4355 - DNA, 25 bp, Artificial
  primer
gacaaccatttccaagtacttctca

SEQ ID NO: 4356 - DNA, 25 bp, Artificial
  primer
ggcctccaaggagactcatgtaatg

SEQ ID NO: 4357 - DNA, 25 bp, Artificial
  primer
aatggattaccgggccttggtgcat

SEQ ID NO: 4358 - DNA, 25 bp, Artificial
  primer
gccttggtgcatgagcgagatgagg

SEQ ID NO: 4359 - DNA, 25 bp, Artificial
  primer
tatggggagctcagggccatggtgc

SEQ ID NO: 4360 - DNA, 25 bp, Artificial
  primer
gggccttctatgctgagctttatca

SEQ ID NO: 4361 - DNA, 25 bp, Artificial
  primer
ctttatcatatcatcagcagcaacc

SEQ ID NO: 4362 - DNA, 25 bp, Artificial
  primer
gtgccacttatccaccaggagggca

SEQ ID NO: 4363 - DNA, 25 bp, Artificial
  primer
aggaggctgctgccaagtactacga

SEQ ID NO: 4364 - DNA, 25 bp, Artificial
  primer
caagtactacgatgccattgcctgc

SEQ ID NO: 4365 - DNA, 25 bp, Artificial
  primer
cattgcctgcctcaagaacctgcag

SEQ ID NO: 4366 - DNA, 25 bp, Artificial
  primer
cctgggtcccctgaatggatccagc

SEQ ID NO: 4367 - DNA, 25 bp, Artificial
  primer
gaggagtactacgaggtgctggacc

SEQ ID NO: 4368 - DNA, 25 bp, Artificial
  primer
gtcaaggcctacttcaagcggggca

SEQ ID NO: 4369 - DNA, 25 bp, Artificial
  primer
cggccgtgtggaatgcccaggaggc

SEQ ID NO: 4370 - DNA, 25 bp, Artificial
  primer
gcctgtggtgagccgagagctgcgg

SEQ ID NO: 4371 - DNA, 25 bp, Artificial
  primer
cctggaggcacggatccggcagaag

SEQ ID NO: 4372 - DNA, 25 bp, Artificial
  primer
gggatcttctcccattgacaggagc

SEQ ID NO: 4373 - DNA, 25 bp, Artificial
  primer
gctactttgaattaatctgccttta

SEQ ID NO: 4374 - DNA, 25 bp, Artificial
  primer
ttgatcttttggccccatttgttaa

SEQ ID NO: 4375 - DNA, 25 bp, Artificial
  primer
ttggccccatttgttaattgtattc

SEQ ID NO: 4376 - DNA, 25 bp, Artificial
  primer
gtattcagtatttgaacgtcgtcct

SEQ ID NO: 4377 - DNA, 25 bp, Artificial
  primer
gaacgtcgtcctgtttattgttagt

SEQ ID NO: 4378 - DNA, 25 bp, Artificial
  primer
gttaatccagattatatggtcctta

SEQ ID NO: 4379 - DNA, 25 bp, Artificial
  primer
tatggtccttatatgtgtacaacat

SEQ ID NO: 4380 - DNA, 25 bp, Artificial
  primer
gtcttgcattgtgaggtacaggcgg

SEQ ID NO: 4381 - DNA, 25 bp, Artificial
  primer
gtacaggcggaagttggaatcaggt

SEQ ID NO: 4382 - DNA, 25 bp, Artificial
  primer
ttaggattctgtctctcattagctg

SEQ ID NO: 4383 - DNA, 25 bp, Artificial
  primer
atgtgaggattaacttctgccagct

SEQ ID NO: 4384 - DNA, 25 bp, Artificial
  primer
ctggctggaccaggatgcagtcaca

SEQ ID NO: 4385 - DNA, 25 bp, Artificial
  primer
ggctacctgccatgtggttagcgac

SEQ ID NO: 4386 - DNA, 25 bp, Artificial
  primer
tggttagcgactcatggactcatcc

SEQ ID NO: 4387 - DNA, 25 bp, Artificial
  primer
tcccaggccttcgcagattatgtta

SEQ ID NO: 4388 - DNA, 25 bp, Artificial
  primer
cggtaccatcagcttgcaggggctg

SEQ ID NO: 4389 - DNA, 25 bp, Artificial
  primer
tgcaggggctgaagcatgggctgcc

SEQ ID NO: 4390 - DNA, 25 bp, Artificial
  primer
gaggcccagcaaacaggcattctca

SEQ ID NO: 4391 - DNA, 25 bp, Artificial
  primer
ggcattctcacagctgggtttatag

SEQ ID NO: 4392 - DNA, 25 bp, Artificial
  primer
ctcagtatcctgggaaccctgggcc

SEQ ID NO: 4393 - DNA, 25 bp, Artificial
  primer
ataattgctgaagagatcccctccc

SEQ ID NO: 4394 - DNA, 25 bp, Artificial
  primer
tcaaaccctttcatacctttattct

SEQ ID NO: 4395 - DNA, 25 bp, Artificial
  primer
gaagctgttgcaatggagtcttatg

SEQ ID NO: 4396 - DNA, 25 bp, Artificial
  primer
atgttgccaaccatcatagctgaca

SEQ ID NO: 4397 - DNA, 25 bp, Artificial
  primer
gctatgacagtgcagacctggtggc

SEQ ID NO: 4398 - DNA, 25 bp, Artificial
  primer
gctcagggctgctcacagtgaaggc

SEQ ID NO: 4399 - DNA, 25 bp, Artificial
  primer
gaaggcaataccactgctggattgg

SEQ ID NO: 4400 - DNA, 25 bp, Artificial
  primer
agatatggctatcctgggtataaca

SEQ ID NO: 4401 - DNA, 25 bp, Artificial
  primer
aggtgattctgcgtgtggacaacat

SEQ ID NO: 4402 - DNA, 25 bp, Artificial
  primer
ggacaacatcatcaaagcggcaccc

SEQ ID NO: 4403 - DNA, 25 bp, Artificial
  primer
acgtgctgtcgatctttggaccagt

SEQ ID NO: 4404 - DNA, 25 bp, Artificial
  primer
gaccagtttctagcaaagttgtgtt

SEQ ID NO: 4405 - DNA, 25 bp, Artificial
  primer
atttagctgaccttcgctttaacat

SEQ ID NO: 4406 - DNA, 25 bp, Artificial
  primer
aaaaggcatcaacttctgcgggaag

SEQ ID NO: 4407 - DNA, 25 bp, Artificial
  primer
gtcccgcggttaagtgttggttcag

SEQ ID NO: 4408 - DNA, 25 bp, Artificial
  primer
tactagcagaccaagtactcccaca

SEQ ID NO: 4409 - DNA, 25 bp, Artificial
  primer
aaagtagggactcccatgtccctca

SEQ ID NO: 4410 - DNA, 25 bp, Artificial
  primer
agtacagatgcctacttctcagtct

SEQ ID NO: 4411 - DNA, 25 bp, Artificial
  primer
ctacttctcagtctccagctgtaaa

SEQ ID NO: 4412 - DNA, 25 bp, Artificial
  primer
gtaaaagcttcaattcctgcaacct

SEQ ID NO: 4413 - DNA, 25 bp, Artificial
  primer
aatccatcattaatcgggtccaaaa

SEQ ID NO: 4414 - DNA, 25 bp, Artificial
  primer
gtccaaaaacattcttattaccact

SEQ ID NO: 4415 - DNA, 25 bp, Artificial
  primer
gataatctgtaatctagccttgctg

SEQ ID NO: 4416 - DNA, 25 bp, Artificial
  primer
aacacagttaccatacttttcaatt

SEQ ID NO: 4417 - DNA, 25 bp, Artificial
  primer
acgagttctcacctgatgtggtcct

SEQ ID NO: 4418 - DNA, 25 bp, Artificial
  primer
gtcaccgccagatgttttggccact

SEQ ID NO: 4419 - DNA, 25 bp, Artificial
  primer
tttggccacttgaccaggcagctga

SEQ ID NO: 4420 - DNA, 25 bp, Artificial
  primer
ctgatgaccctggcagggggccggg

SEQ ID NO: 4421 - DNA, 25 bp, Artificial
  primer
gtctcggctctgctcagtgtagagc

SEQ ID NO: 4422 - DNA, 25 bp, Artificial
  primer
gcagcccttggatgaggcagtcttg

SEQ ID NO: 4423 - DNA, 25 bp, Artificial
  primer
aaagcccaacatcaacgcagtggcc

SEQ ID NO: 4424 - DNA, 25 bp, Artificial
  primer
cgcagtggccacgctagagaaagtc

SEQ ID NO: 4425 - DNA, 25 bp, Artificial
  primer
gtcatcgagatccagagcaaacact

SEQ ID NO: 4426 - DNA, 25 bp, Artificial
  primer
aagcaggtgagaccgaggaggccga

SEQ ID NO: 4427 - DNA, 25 bp, Artificial
  primer
catggagcaggagcctgccctgtga

SEQ ID NO: 4428 - DNA, 25 bp, Artificial
  primer
atatgtattcattcactttcaagat

SEQ ID NO: 4429 - DNA, 25 bp, Artificial
  primer
cttctgttgaattagctctgccacc

SEQ ID NO: 4430 - DNA, 25 bp, Artificial
  primer
agctctgccaccaatatgtatcttc

SEQ ID NO: 4431 - DNA, 25 bp, Artificial
  primer
gtatcttcatacacgtttggaaatg

SEQ ID NO: 4432 - DNA, 25 bp, Artificial
  primer
ggaaatgtttcctgcagcattaggt

SEQ ID NO: 4433 - DNA, 25 bp, Artificial
  primer
gcattaggtatgacttgttctgagt

SEQ ID NO: 4434 - DNA, 25 bp, Artificial
  primer
tgagtactgcttccggtgctaaaat

SEQ ID NO: 4435 - DNA, 25 bp, Artificial
  primer
ttaatggcatggactctggagaatc

SEQ ID NO: 4436 - DNA, 25 bp, Artificial
  primer
tatgcgaatcaacctttctacctta

SEQ ID NO: 4437 - DNA, 25 bp, Artificial
  primer
tctaccttaatatctccccaaaaat

SEQ ID NO: 4438 - DNA, 25 bp, Artificial
  primer
gtttgctctgcatttttgatgatgg

SEQ ID NO: 4439 - DNA, 25 bp, Artificial
  primer
gccactacacttcttaaggcgagca

SEQ ID NO: 4440 - DNA, 25 bp, Artificial
  primer
gcgagcatcaaaagccggggaggtt

SEQ ID NO: 4441 - DNA, 25 bp, Artificial
  primer
atggagctgactctcatcgactatg

SEQ ID NO: 4442 - DNA, 25 bp, Artificial
  primer
atatggtgcattatcatccttctaa

SEQ ID NO: 4443 - DNA, 25 bp, Artificial
  primer
atccttctaaggtagcagcagctgc

SEQ ID NO: 4444 - DNA, 25 bp, Artificial
  primer
acttaactaaattcatcgccatcaa

SEQ ID NO: 4445 - DNA, 25 bp, Artificial
  primer
caaaagccgtcaaagaccttgcctc

SEQ ID NO: 4446 - DNA, 25 bp, Artificial
  primer
cttgcctccccactgataggaaggt

SEQ ID NO: 4447 - DNA, 25 bp, Artificial
  primer
gataggaaggtcctaggctgccgtg

SEQ ID NO: 4448 - DNA, 25 bp, Artificial
  primer
gattttgtacatagtcctctggtct

SEQ ID NO: 4449 - DNA, 25 bp, Artificial
  primer
agtcctctggtctatctcatgaaac

SEQ ID NO: 4450 - DNA, 25 bp, Artificial
  primer
ataggagacttgtacagttgactgg

SEQ ID NO: 4451 - DNA, 25 bp, Artificial
  primer
ggctttcctctcgttggtagttgag

SEQ ID NO: 4452 - DNA, 25 bp, Artificial
  primer
tgagacgctgttgcaaattccaccc

SEQ ID NO: 4453 - DNA, 25 bp, Artificial
  primer
tccttccctggtccagattgtagct

SEQ ID NO: 4454 - DNA, 25 bp, Artificial
  primer
tccagattgtagctcttagtcctcc

SEQ ID NO: 4455 - DNA, 25 bp, Artificial
  primer
tcagctggccgggttggaggcctca

SEQ ID NO: 4456 - DNA, 25 bp, Artificial
  primer
gctctggtgggaaaatgtcccccac

SEQ ID NO: 4457 - DNA, 25 bp, Artificial
  primer
gtttcttgggaaaatatcactttgt

SEQ ID NO: 4458 - DNA, 25 bp, Artificial
  primer
atatcactttgtattctctgtccag

SEQ ID NO: 4459 - DNA, 25 bp, Artificial
  primer
tttgtattctctgtccagggcttca

SEQ ID NO: 4460 - DNA, 25 bp, Artificial
  primer
ccagggcttcagatattttgcacga

SEQ ID NO: 4461 - DNA, 25 bp, Artificial
  primer
ctccctaacgagactctctgtgctg

SEQ ID NO: 4462 - DNA, 25 bp, Artificial
  primer
gtgctgggggtgctaattacatggc

SEQ ID NO: 4463 - DNA, 25 bp, Artificial
  primer
gaatggggcctctaaggggagtgtg

SEQ ID NO: 4464 - DNA, 25 bp, Artificial
  primer
gagaaacctatttctcagacccctt

SEQ ID NO: 4465 - DNA, 25 bp, Artificial
  primer
accccacttgtatgctctggaatct

SEQ ID NO: 4466 - DNA, 25 bp, Artificial
  primer
atggggacatgacttctggacagag

SEQ ID NO: 4467 - DNA, 25 bp, Artificial
  primer
tacctcatacgcagctcatcttaaa

SEQ ID NO: 4468 - DNA, 25 bp, Artificial
  primer
ctcggtggacgagagtgtctgactc

SEQ ID NO: 4469 - DNA, 25 bp, Artificial
  primer
gtctgactcagatatctacctcgga

SEQ ID NO: 4470 - DNA, 25 bp, Artificial
  primer
acctcggagggagtttctgctactt

SEQ ID NO: 4471 - DNA, 25 bp, Artificial
  primer
agggaattattgactgggctttggg

SEQ ID NO: 4472 - DNA, 25 bp, Artificial
  primer
atgcgtagggctctgaacattttgc

SEQ ID NO: 4473 - DNA, 25 bp, Artificial
  primer
cagaggagactgtctacacctgcac

SEQ ID NO: 4474 - DNA, 25 bp, Artificial
  primer
cacccgctcaagtcagacattgcca

SEQ ID NO: 4475 - DNA, 25 bp, Artificial
  primer
atagagttgactttccatcttcagt

SEQ ID NO: 4476 - DNA, 25 bp, Artificial
  primer
gagtacaggctttctgttggcacca

SEQ ID NO: 4477 - DNA, 25 bp, Artificial
  primer
acgagaagatccagctgagctccct

SEQ ID NO: 4478 - DNA, 25 bp, Artificial
  primer
gctgcatttcaagtcaccagagacc

SEQ ID NO: 4479 - DNA, 25 bp, Artificial
  primer
gagacctgattgttgcagaggccta

SEQ ID NO: 4480 - DNA, 25 bp, Artificial
  primer
gcctagatgctctgagggccattca

SEQ ID NO: 4481 - DNA, 25 bp, Artificial
  primer
gggccattcacaattctcagggctc

SEQ ID NO: 4482 - DNA, 25 bp, Artificial
  primer
atcagtcaccccgaatcttggaaaa

SEQ ID NO: 4483 - DNA, 25 bp, Artificial
  primer
tcatcacttccttctggttttatgt

SEQ ID NO: 4484 - DNA, 25 bp, Artificial
  primer
ttccgatccaccactgtactagtaa

SEQ ID NO: 4485 - DNA, 25 bp, Artificial
  primer
gtcttccatgaacctgcaattgttt

SEQ ID NO: 4486 - DNA, 25 bp, Artificial
  primer
tatgcgtcagcattttccaatttcc

SEQ ID NO: 4487 - DNA, 25 bp, Artificial
  primer
aggttggatctagagctgctgttga

SEQ ID NO: 4488 - DNA, 25 bp, Artificial
  primer
gctgctgttgatcactcaggcatac

SEQ ID NO: 4489 - DNA, 25 bp, Artificial
  primer
gtccaagctgcagtccatgagcaat

SEQ ID NO: 4490 - DNA, 25 bp, Artificial
  primer
catgagcaataacagactaccccag

SEQ ID NO: 4491 - DNA, 25 bp, Artificial
  primer
gactaccccagatactgcagtttac

SEQ ID NO: 4492 - DNA, 25 bp, Artificial
  primer
gaaagtcttcttttttgaccagttg

SEQ ID NO: 4493 - DNA, 25 bp, Artificial
  primer
gagggagcatgtgacacagccagta

SEQ ID NO: 4494 - DNA, 25 bp, Artificial
  primer
aaatgatacttactgaactgtgtgt

SEQ ID NO: 4495 - DNA, 25 bp, Artificial
  primer
gtacctatttgacttaccatggagt

SEQ ID NO: 4496 - DNA, 25 bp, Artificial
  primer
ggaggtttttttgtcaacattgtga

SEQ ID NO: 4497 - DNA, 25 bp, Artificial
  primer
aagctagatgctttcctaaatcaga

SEQ ID NO: 4498 - DNA, 25 bp, Artificial
  primer
cagaatctttgttaaggtcctgaaa

SEQ ID NO: 4499 - DNA, 25 bp, Artificial
  primer
aggtcctgaaagtaactcataatct

SEQ ID NO: 4500 - DNA, 25 bp, Artificial
  primer
attgctgtatagctccttttgacct

SEQ ID NO: 4501 - DNA, 25 bp, Artificial
  primer
ctccttttgaccttcatttcatgta

SEQ ID NO: 4502 - DNA, 25 bp, Artificial
  primer
atttcatgtatagttttccctattg

SEQ ID NO: 4503 - DNA, 25 bp, Artificial
  primer
gttttccctattgaatcagtttcca

SEQ ID NO: 4504 - DNA, 25 bp, Artificial
  primer
atttgtactgtttaatgttctgtga

SEQ ID NO: 4505 - DNA, 25 bp, Artificial
  primer
ggctttcagctctatcagagtgacc

SEQ ID NO: 4506 - DNA, 25 bp, Artificial
  primer
agagtgaccctagtggaaattacgg

SEQ ID NO: 4507 - DNA, 25 bp, Artificial
  primer
gggggatggaaggccacatgcattg

SEQ ID NO: 4508 - DNA, 25 bp, Artificial
  primer
gaaataatagcgctgcagctgtgtc

SEQ ID NO: 4509 - DNA, 25 bp, Artificial
  primer
gcgctgcagctgtgtcaatgttgaa

SEQ ID NO: 4510 - DNA, 25 bp, Artificial
  primer
gaaatgaccttgaagtcagcacttg

SEQ ID NO: 4511 - DNA, 25 bp, Artificial
  primer
catggatgttagtaaactctctgct

SEQ ID NO: 4512 - DNA, 25 bp, Artificial
  primer
aagacagtaatcagagttctcaaac

SEQ ID NO: 4513 - DNA, 25 bp, Artificial
  primer
tactgaattgggtccttgtcatttc

SEQ ID NO: 4514 - DNA, 25 bp, Artificial
  primer
gtccttgtcatttctgtccaattga

SEQ ID NO: 4515 - DNA, 25 bp, Artificial
  primer
tacccttcatggacgtcttaatctt

SEQ ID NO: 4516 - DNA, 25 bp, Artificial
  primer
ggggcccaaggaattcgcaagatgg

SEQ ID NO: 4517 - DNA, 25 bp, Artificial
  primer
aggaattcgcaagatggcgccgtcc

SEQ ID NO: 4518 - DNA, 25 bp, Artificial
  primer
gcccttcagtgcgatcaaagttcta

SEQ ID NO: 4519 - DNA, 25 bp, Artificial
  primer
gtgcgatcaaagttctacgtgcgag

SEQ ID NO: 4520 - DNA, 25 bp, Artificial
  primer
ttctacgtgcgagagccgccgaatg

SEQ ID NO: 4521 - DNA, 25 bp, Artificial
  primer
ccgccgaatgccaaacctgactggc

SEQ ID NO: 4522 - DNA, 25 bp, Artificial
  primer
acctgactggctgaaagttgggttc

SEQ ID NO: 4523 - DNA, 25 bp, Artificial
  primer
tgaaagttgggttcaccttgggcac

SEQ ID NO: 4524 - DNA, 25 bp, Artificial
  primer
gtcttcttgtggatctatctcatca

SEQ ID NO: 4525 - DNA, 25 bp, Artificial
  primer
ggatctatctcatcaaacaacacaa

SEQ ID NO: 4526 - DNA, 25 bp, Artificial
  primer
caagccagcatttgtattttgcatc

SEQ ID NO: 4527 - DNA, 25 bp, Artificial
  primer
gaagtagagatgtggcggctttccc

SEQ ID NO: 4528 - DNA, 25 bp, Artificial
  primer
gaggttgagttctccacaacagctc

SEQ ID NO: 4529 - DNA, 25 bp, Artificial
  primer
aacagctcccaagcatcatgggcct

SEQ ID NO: 4530 - DNA, 25 bp, Artificial
  primer
ctgtgccacggctagtgttgtgtga

SEQ ID NO: 4531 - DNA, 25 bp, Artificial
  primer
cacctcccagggtaggcacctgggg

SEQ ID NO: 4532 - DNA, 25 bp, Artificial
  primer
ccacctcccagggtaggcacctggg

SEQ ID NO: 4533 - DNA, 25 bp, Artificial
  primer
acctctttctcttgggtgaggctct

SEQ ID NO: 4534 - DNA, 25 bp, Artificial
  primer
gaggctctggcaaggagatctctct

SEQ ID NO: 4535 - DNA, 25 bp, Artificial
  primer
agatctctctgctcaagcacagcag

SEQ ID NO: 4536 - DNA, 25 bp, Artificial
  primer
ggcccctctccatgaattggaactt

SEQ ID NO: 4537 - DNA, 25 bp, Artificial
  primer
tcaactttcagtctcttttctgggg

SEQ ID NO: 4538 - DNA, 25 bp, Artificial
  primer
atggagatggtactggagtcgccag

SEQ ID NO: 4539 - DNA, 25 bp, Artificial
  primer
tcgccagtatttaccgggggccatt

SEQ ID NO: 4540 - DNA, 25 bp, Artificial
  primer
tttaaacttagacactcagctccag

SEQ ID NO: 4541 - DNA, 25 bp, Artificial
  primer
gctttccatggcgaacagtggtcca

SEQ ID NO: 4542 - DNA, 25 bp, Artificial
  primer
atcacctgctctaagtgcgattggc

SEQ ID NO: 4543 - DNA, 25 bp, Artificial
  primer
aaaatcatcgatggacttctagtga

SEQ ID NO: 4544 - DNA, 25 bp, Artificial
  primer
ttcccacaggccccaacaataagcc

SEQ ID NO: 4545 - DNA, 25 bp, Artificial
  primer
ctacctgtggtgatctcgcagtgtg

SEQ ID NO: 4546 - DNA, 25 bp, Artificial
  primer
aaagactgaatcaggccttcccttc

SEQ ID NO: 4547 - DNA, 25 bp, Artificial
  primer
agtaagataatctggactggccccc

SEQ ID NO: 4548 - DNA, 25 bp, Artificial
  primer
ctgctgccccatttgatcaagagac

SEQ ID NO: 4549 - DNA, 25 bp, Artificial
  primer
gaagcctgtgtcgaggcagcttccc

SEQ ID NO: 4550 - DNA, 25 bp, Artificial
  primer
tccctttgcctgctgatattctgca

SEQ ID NO: 4551 - DNA, 25 bp, Artificial
  primer
gcaacctgcatttcactttgtggtc

SEQ ID NO: 4552 - DNA, 25 bp, Artificial
  primer
tttcactttgtggtcaggccgtgtc

SEQ ID NO: 4553 - DNA, 25 bp, Artificial
  primer
cgtgtctttgtgctgtgactgcatc

SEQ ID NO: 4554 - DNA, 25 bp, Artificial
  primer
gtgactgcatcacctttatggagtg

SEQ ID NO: 4555 - DNA, 25 bp, Artificial
  primer
gtccttggtgttctccacaagtggt

SEQ ID NO: 4556 - DNA, 25 bp, Artificial
  primer
ggttgacatttgactgcttgttcca

SEQ ID NO: 4557 - DNA, 25 bp, Artificial
  primer
tttgacagtgtgggtcgttcctggg

SEQ ID NO: 4558 - DNA, 25 bp, Artificial
  primer
ttctgagtcattgcatcctctacca

SEQ ID NO: 4559 - DNA, 25 bp, Artificial
  primer
tctaccagctgttaatccatcactc

SEQ ID NO: 4560 - DNA, 25 bp, Artificial
  primer
taactctaccctggcactataatgt

SEQ ID NO: 4561 - DNA, 25 bp, Artificial
  primer
gctctactgaggtgctatgttctta

SEQ ID NO: 4562 - DNA, 25 bp, Artificial
  primer
tcttagtggatgttctgaccctgct

SEQ ID NO: 4563 - DNA, 25 bp, Artificial
  primer
tctgaccctgcttcaaatatttccc

SEQ ID NO: 4564 - DNA, 25 bp, Artificial
  primer
ggtactaaggaatctttctgctttg

SEQ ID NO: 4565 - DNA, 25 bp, Artificial
  primer
gctttggggtttatcagaattctca

SEQ ID NO: 4566 - DNA, 25 bp, Artificial
  primer
aatgctctttacttcatggacttcc

SEQ ID NO: 4567 - DNA, 25 bp, Artificial
  primer
ttacttcatggacttccactgccat

SEQ ID NO: 4568 - DNA, 25 bp, Artificial
  primer
attctttcagtggctacctacatac

SEQ ID NO: 4569 - DNA, 25 bp, Artificial
  primer
gctacctacatacaattccaaacac

SEQ ID NO: 4570 - DNA, 25 bp, Artificial
  primer
aatgaggtactctcctggaaatatt

SEQ ID NO: 4571 - DNA, 25 bp, Artificial
  primer
aactgtcaaactgggtggagatcta

SEQ ID NO: 4572 - DNA, 25 bp, Artificial
  primer
aggaacctatgtgatcaacaagcag

SEQ ID NO: 4573 - DNA, 25 bp, Artificial
  primer
caagcagacgccaaacaagcaaatc

SEQ ID NO: 4574 - DNA, 25 bp, Artificial
  primer
ttctccatccagtggacctaagcgt

SEQ ID NO: 4575 - DNA, 25 bp, Artificial
  primer
atccagtggacctaagcgttatgac

SEQ ID NO: 4576 - DNA, 25 bp, Artificial
  primer
ttggcctattccggaaaagatgctt

SEQ ID NO: 4577 - DNA, 25 bp, Artificial
  primer
cggaaaagatgcttgatgcccagcc

SEQ ID NO: 4578 - DNA, 25 bp, Artificial
  primer
taaggacattaaaagctatcaggcc

SEQ ID NO: 4579 - DNA, 25 bp, Artificial
  primer
ttgggctatgtgtcacagctctgta

SEQ ID NO: 4580 - DNA, 25 bp, Artificial
  primer
ttttggattgtcggatttcctccct

SEQ ID NO: 4581 - DNA, 25 bp, Artificial
  primer
taatgtcttatgcctatacctgaat

SEQ ID NO: 4582 - DNA, 25 bp, Artificial
  primer
gatcttaaagccacggagaagcctc

SEQ ID NO: 4583 - DNA, 25 bp, Artificial
  primer
tgcccttgtttcttgtggagtcagg

SEQ ID NO: 4584 - DNA, 25 bp, Artificial
  primer
atgaggcaaagaggcacctcctcca

SEQ ID NO: 4585 - DNA, 25 bp, Artificial
  primer
gaaggtccagctcagtggcacaagt

SEQ ID NO: 4586 - DNA, 25 bp, Artificial
  primer
gacgggtataatccctgagacccag

SEQ ID NO: 4587 - DNA, 25 bp, Artificial
  primer
gacccagattgtgacttgcaatgga

SEQ ID NO: 4588 - DNA, 25 bp, Artificial
  primer
agaaagggcaacttactcttcctgg

SEQ ID NO: 4589 - DNA, 25 bp, Artificial
  primer
actcttcctggcatcttattgtatt

SEQ ID NO: 4590 - DNA, 25 bp, Artificial
  primer
aatctcttactcaacgaacacatct

SEQ ID NO: 4591 - DNA, 25 bp, Artificial
  primer
catcttctgatgatttcccaaaatt

SEQ ID NO: 4592 - DNA, 25 bp, Artificial
  primer
attgcccaactctatgtttctttga

SEQ ID NO: 4593 - DNA, 25 bp, Artificial
  primer
gcctgtgtcttcgggctgaatttga

SEQ ID NO: 4594 - DNA, 25 bp, Artificial
  primer
gtgtcttcgggctgaatttgatctg

SEQ ID NO: 4595 - DNA, 25 bp, Artificial
  primer
tgaatttgatctggccatcccaggg

SEQ ID NO: 4596 - DNA, 25 bp, Artificial
  primer
agtcccctgatggcagccagaagac

SEQ ID NO: 4597 - DNA, 25 bp, Artificial
  primer
tgatggcagccagaagacgtctcta

SEQ ID NO: 4598 - DNA, 25 bp, Artificial
  primer
ggcagccagaagacgtctctagtgt

SEQ ID NO: 4599 - DNA, 25 bp, Artificial
  primer
gccagaagacgtctctagtgttgcg

SEQ ID NO: 4600 - DNA, 25 bp, Artificial
  primer
gaagacgtctctagtgttgcgaaca

SEQ ID NO: 4601 - DNA, 25 bp, Artificial
  primer
gtctctagtgttgcgaacactctgt

SEQ ID NO: 4602 - DNA, 25 bp, Artificial
  primer
tgtgcacttgtatgttttgtaaact

SEQ ID NO: 4603 - DNA, 25 bp, Artificial
  primer
ttgtaaacttggcatctgtaaaaat

SEQ ID NO: 4604 - DNA, 25 bp, Artificial
  primer
ccatctggaccataatagggacacc

SEQ ID NO: 4605 - DNA, 25 bp, Artificial
  primer
cggttaagagtctgtgctggttgcc

SEQ ID NO: 4606 - DNA, 25 bp, Artificial
  primer
gagaacagttgtccaggatgctggc

SEQ ID NO: 4607 - DNA, 25 bp, Artificial
  primer
acaacctgctggcccgaaacaaggc

SEQ ID NO: 4608 - DNA, 25 bp, Artificial
  primer
aacaaggctgccaggtgtggaacag

SEQ ID NO: 4609 - DNA, 25 bp, Artificial
  primer
aacagcccatgctgactggggacat

SEQ ID NO: 4610 - DNA, 25 bp, Artificial
  primer
gactggggacatacacttgcatctt

SEQ ID NO: 4611 - DNA, 25 bp, Artificial
  primer
ccccattaaggcagctcatccaagc

SEQ ID NO: 4612 - DNA, 25 bp, Artificial
  primer
gacatgttagtttttcttacttgca

SEQ ID NO: 4613 - DNA, 25 bp, Artificial
  primer
cagagatactgttgtcaccttctgg

SEQ ID NO: 4614 - DNA, 25 bp, Artificial
  primer
ggggagtgcatttagacttatgtgg

SEQ ID NO: 4615 - DNA, 25 bp, Artificial
  primer
ggagctgctgggacaggggattgat

SEQ ID NO: 4616 - DNA, 25 bp, Artificial
  primer
agctcacggctgacgccaagtttga

SEQ ID NO: 4617 - DNA, 25 bp, Artificial
  primer
tccagtgcggccaagcacagtgtcg

SEQ ID NO: 4618 - DNA, 25 bp, Artificial
  primer
agtgtcgatggcgaatccttgtcca

SEQ ID NO: 4619 - DNA, 25 bp, Artificial
  primer
tccttgtccagtgaactgcagcagc

SEQ ID NO: 4620 - DNA, 25 bp, Artificial
  primer
agctggggctgcccaaagagcacgc

SEQ ID NO: 4621 - DNA, 25 bp, Artificial
  primer
ccagcctgtgccgctgttatgagga

SEQ ID NO: 4622 - DNA, 25 bp, Artificial
  primer
caaagccccttgcagaagcacttgc

SEQ ID NO: 4623 - DNA, 25 bp, Artificial
  primer
tgaactgctcttcgggaggcagccc

SEQ ID NO: 4624 - DNA, 25 bp, Artificial
  primer
gccctggttctaggatgctgaggcc

SEQ ID NO: 4625 - DNA, 25 bp, Artificial
  primer
gcctcacttctctcttgagaacttg

SEQ ID NO: 4626 - DNA, 25 bp, Artificial
  primer
tgaacagctatcacgttgaaccacg

SEQ ID NO: 4627 - DNA, 25 bp, Artificial
  primer
gaaactgctgttttctaggccaaaa

SEQ ID NO: 4628 - DNA, 25 bp, Artificial
  primer
tgtgtcacagtttcaggcttttatg

SEQ ID NO: 4629 - DNA, 25 bp, Artificial
  primer
tggaagctgttcagggcatcggcag

SEQ ID NO: 4630 - DNA, 25 bp, Artificial
  primer
ggtcagcgttactatcatctcggat

SEQ ID NO: 4631 - DNA, 25 bp, Artificial
  primer
ggatcatatggagctcatgtcagcc

SEQ ID NO: 4632 - DNA, 25 bp, Artificial
  primer
tcatgtcagccgtgtgggtggcggg

SEQ ID NO: 4633 - DNA, 25 bp, Artificial
  primer
gcgggtgcacagagacggtctggaa

SEQ ID NO: 4634 - DNA, 25 bp, Artificial
  primer
ggaaggaaacacgcggatctgaaca

SEQ ID NO: 4635 - DNA, 25 bp, Artificial
  primer
ggttgggctagattacagagggctc

SEQ ID NO: 4636 - DNA, 25 bp, Artificial
  primer
tacagagggctcattttctacgtca

SEQ ID NO: 4637 - DNA, 25 bp, Artificial
  primer
ccgccttcaagtcccatgaatttac

SEQ ID NO: 4638 - DNA, 25 bp, Artificial
  primer
caaactgagtcatgttcaccgcatc

SEQ ID NO: 4639 - DNA, 25 bp, Artificial
  primer
catccccgtggtggtacagtcggtg

SEQ ID NO: 4640 - DNA, 25 bp, Artificial
  primer
tggtacagtcggtgcctgttgtcta

SEQ ID NO: 4641 - DNA, 25 bp, Artificial
  primer
gtctacacagctgtaaggtcacctg

SEQ ID NO: 4642 - DNA, 25 bp, Artificial
  primer
gaacaacactattgtcgtgccgctt

SEQ ID NO: 4643 - DNA, 25 bp, Artificial
  primer
gtcgtgccgcttttggaggatggga

SEQ ID NO: 4644 - DNA, 25 bp, Artificial
  primer
tggcaaagcacaaatggacccccga

SEQ ID NO: 4645 - DNA, 25 bp, Artificial
  primer
aggcctatctcccagacaaagtaaa

SEQ ID NO: 4646 - DNA, 25 bp, Artificial
  primer
aaatgtgaccttagatagcgttaat

SEQ ID NO: 4647 - DNA, 25 bp, Artificial
  primer
ccctttccatagccagagcagtaca

SEQ ID NO: 4648 - DNA, 25 bp, Artificial
  primer
gagtttagctatgcttcagctgtat

SEQ ID NO: 4649 - DNA, 25 bp, Artificial
  primer
tacaggaccacagttgatttccctt

SEQ ID NO: 4650 - DNA, 25 bp, Artificial
  primer
gatttcccttcttgatttggtactt

SEQ ID NO: 4651 - DNA, 25 bp, Artificial
  primer
ctcccagagggtgcagaaacagatt

SEQ ID NO: 4652 - DNA, 25 bp, Artificial
  primer
aaagccacttcatataggacttaat

SEQ ID NO: 4653 - DNA, 25 bp, Artificial
  primer
tagccaagaggcccagaaatctaaa

SEQ ID NO: 4654 - DNA, 25 bp, Artificial
  primer
gaagagatccctaatatgcctcctg

SEQ ID NO: 4655 - DNA, 25 bp, Artificial
  primer
aatatgcctcctgaaatgcagctta

SEQ ID NO: 4656 - DNA, 25 bp, Artificial
  primer
ttaaggtcctgcattcagctctttt

SEQ ID NO: 4657 - DNA, 25 bp, Artificial
  primer
ttgaaagtgttctagctcgagtgga

SEQ ID NO: 4658 - DNA, 25 bp, Artificial
  primer
ataaaaacaaagtctacctctgaag

SEQ ID NO: 4659 - DNA, 25 bp, Artificial
  primer
gggagttaggaccaccaatggattg

SEQ ID NO: 4660 - DNA, 25 bp, Artificial
  primer
gagatggagtgagctgagacagata

SEQ ID NO: 4661 - DNA, 25 bp, Artificial
  primer
cttactgcccaggcctatctggaag

SEQ ID NO: 4662 - DNA, 25 bp, Artificial
  primer
gaaatggatgtaagcctggcccata

SEQ ID NO: 4663 - DNA, 25 bp, Artificial
  primer
aagcctggcccataatgtgaacata

SEQ ID NO: 4664 - DNA, 25 bp, Artificial
  primer
aagtaatcactaatgctcaacaatt

SEQ ID NO: 4665 - DNA, 25 bp, Artificial
  primer
gctcaacaatttatccattcaatca

SEQ ID NO: 4666 - DNA, 25 bp, Artificial
  primer
ttcattgggttgtcagatagtctat

SEQ ID NO: 4667 - DNA, 25 bp, Artificial
  primer
tttagattattccaagccttatttt

SEQ ID NO: 4668 - DNA, 25 bp, Artificial
  primer
gatttttggcactttgttttcaaga

SEQ ID NO: 4669 - DNA, 25 bp, Artificial
  primer
ttttctgcctaatagtaactggtta

SEQ ID NO: 4670 - DNA, 25 bp, Artificial
  primer
actcgcacaccaaccttatatttgg

SEQ ID NO: 4671 - DNA, 25 bp, Artificial
  primer
ggacttcaaattggacccaggagcc

SEQ ID NO: 4672 - DNA, 25 bp, Artificial
  primer
ggacaagcttcatttacacgatatc

SEQ ID NO: 4673 - DNA, 25 bp, Artificial
  primer
ggagatgtgtatattgggcccgatg

SEQ ID NO: 4674 - DNA, 25 bp, Artificial
  primer
attgggcccgatgatgcacaacaaa

SEQ ID NO: 4675 - DNA, 25 bp, Artificial
  primer
ctcatcacacagcagtgcttggaga

SEQ ID NO: 4676 - DNA, 25 bp, Artificial
  primer
gaagccactttgtcttaattgctgg

SEQ ID NO: 4677 - DNA, 25 bp, Artificial
  primer
gagaaccagttatccaacatggtcc

SEQ ID NO: 4678 - DNA, 25 bp, Artificial
  primer
cggaagagcaggtcttgatgtgtcc

SEQ ID NO: 4679 - DNA, 25 bp, Artificial
  primer
gaaggcattccatttctaaagctta

SEQ ID NO: 4680 - DNA, 25 bp, Artificial
  primer
gcttctaaagaattccacactaacg

SEQ ID NO: 4681 - DNA, 25 bp, Artificial
  primer
cgcgcagtcccgaagagtgtaagat

SEQ ID NO: 4682 - DNA, 25 bp, Artificial
  primer
cctctctgatccgagctggatccag

SEQ ID NO: 4683 - DNA, 25 bp, Artificial
  primer
gcatacagaccaatttctgcatcag

SEQ ID NO: 4684 - DNA, 25 bp, Artificial
  primer
tgcatcagtgttatctcgaccagag

SEQ ID NO: 4685 - DNA, 25 bp, Artificial
  primer
atctcgaccagaggctagtaggact

SEQ ID NO: 4686 - DNA, 25 bp, Artificial
  primer
tggggcccagaatggtgtgtctcag

SEQ ID NO: 4687 - DNA, 25 bp, Artificial
  primer
gtgtctcagctaatccaaagggagt

SEQ ID NO: 4688 - DNA, 25 bp, Artificial
  primer
ttgtttgatggttgctttcttgatt

SEQ ID NO: 4689 - DNA, 25 bp, Artificial
  primer
actgcttgacatgttggcattcata

SEQ ID NO: 4690 - DNA, 25 bp, Artificial
  primer
tgtgtatcttactgtgactccgaaa

SEQ ID NO: 4691 - DNA, 25 bp, Artificial
  primer
aaaactgtagtattggtgtcatggg

SEQ ID NO: 4692 - DNA, 25 bp, Artificial
  primer
aactatttgcaccgaaatgtcttgt

SEQ ID NO: 4693 - DNA, 25 bp, Artificial
  primer
gtcttgttttgttgcgacataggaa

SEQ ID NO: 4694 - DNA, 25 bp, Artificial
  primer
caagcacaaagttatattccatcct

SEQ ID NO: 4695 - DNA, 25 bp, Artificial
  primer
atattccatcctttttactgatttt

SEQ ID NO: 4696 - DNA, 25 bp, Artificial
  primer
caatctcatgtccattttggtgtgg

SEQ ID NO: 4697 - DNA, 25 bp, Artificial
  primer
cattttggtgtgggagtcggggtag

SEQ ID NO: 4698 - DNA, 25 bp, Artificial
  primer
atgtgtgtttgctagctcacttgtc

SEQ ID NO: 4699 - DNA, 25 bp, Artificial
  primer
tctcatttttaaatcccctcagagg

SEQ ID NO: 4700 - DNA, 25 bp, Artificial
  primer
aaatcccctcagaggtgtgactagt

SEQ ID NO: 4701 - DNA, 25 bp, Artificial
  primer
gactagtctctttatcagcacacac

SEQ ID NO: 4702 - DNA, 25 bp, Artificial
  primer
ggacaactttgatattgcttggcac

SEQ ID NO: 4703 - DNA, 25 bp, Artificial
  primer
catcgtgatccagcagctctcaaat

SEQ ID NO: 4704 - DNA, 25 bp, Artificial
  primer
ctcaaatggcaaatgggtccccttt

SEQ ID NO: 4705 - DNA, 25 bp, Artificial
  primer
ggtcccctttgatggcgatgacatt

SEQ ID NO: 4706 - DNA, 25 bp, Artificial
  primer
ggagtttgtccgcattgatcctttt

SEQ ID NO: 4707 - DNA, 25 bp, Artificial
  primer
gatccttttgtgaggaccttcctga

SEQ ID NO: 4708 - DNA, 25 bp, Artificial
  primer
acagtgttcagttcaagttgcccga

SEQ ID NO: 4709 - DNA, 25 bp, Artificial
  primer
gttgcccgacgtgtatggtgtattc

SEQ ID NO: 4710 - DNA, 25 bp, Artificial
  primer
gattacaaccggctaggctacacac

SEQ ID NO: 4711 - DNA, 25 bp, Artificial
  primer
cctgtactcttccactcaggtatcc

SEQ ID NO: 4712 - DNA, 25 bp, Artificial
  primer
cacacgcagtatgagcgcttcatcc

SEQ ID NO: 4713 - DNA, 25 bp, Artificial
  primer
atggcacaactttacctctgtggga

SEQ ID NO: 4714 - DNA, 25 bp, Artificial
  primer
ttcttcagccctagatggtgctcgc

SEQ ID NO: 4715 - DNA, 25 bp, Artificial
  primer
cctctcaatgctcatcacacacagg

SEQ ID NO: 4716 - DNA, 25 bp, Artificial
  primer
tcacacacagggctattcctttcct

SEQ ID NO: 4717 - DNA, 25 bp, Artificial
  primer
tcctttcctccaatgaaccaaaccg

SEQ ID NO: 4718 - DNA, 25 bp, Artificial
  primer
agacgaggtcggcctcgtcattccc

SEQ ID NO: 4719 - DNA, 25 bp, Artificial
  primer
ctcttgtgcggttcaccacagttgt

SEQ ID NO: 4720 - DNA, 25 bp, Artificial
  primer
taagtgatcgtgtgagtcgtcgtta

SEQ ID NO: 4721 - DNA, 25 bp, Artificial
  primer
gagtcgtcgttaaatgcctgtctcc

SEQ ID NO: 4722 - DNA, 25 bp, Artificial
  primer
gcatagggacctaaggcccactgga

SEQ ID NO: 4723 - DNA, 25 bp, Artificial
  primer
tggagggcgctcatcaagtagctgc

SEQ ID NO: 4724 - DNA, 25 bp, Artificial
  primer
gatctccgagtcaggacggtcggcc

SEQ ID NO: 4725 - DNA, 25 bp, Artificial
  primer
gcctcaggaactcctccgagtgagg

SEQ ID NO: 4726 - DNA, 25 bp, Artificial
  primer
ctcctttcccaggatcaaggccaca

SEQ ID NO: 4727 - DNA, 25 bp, Artificial
  primer
gaagattgcacgggcactgttctga

SEQ ID NO: 4728 - DNA, 25 bp, Artificial
  primer
actgttctgaggaggaagccccgtt

SEQ ID NO: 4729 - DNA, 25 bp, Artificial
  primer
agccccgttggcttacagaagtcat

SEQ ID NO: 4730 - DNA, 25 bp, Artificial
  primer
gttggatacctgtgtatagcttccc

SEQ ID NO: 4731 - DNA, 25 bp, Artificial
  primer
gattcttggccatatcctaacatgc

SEQ ID NO: 4732 - DNA, 25 bp, Artificial
  primer
caaaggcttcaaggctctgagcccc

SEQ ID NO: 4733 - DNA, 25 bp, Artificial
  primer
aatgtaggtcctcgcaggagctctt

SEQ ID NO: 4734 - DNA, 25 bp, Artificial
  primer
ttcttcccactctgggggtttctat

SEQ ID NO: 4735 - DNA, 25 bp, Artificial
  primer
tgggggtttctatcactgtgacaac

SEQ ID NO: 4736 - DNA, 25 bp, Artificial
  primer
ttaaatgaaaaaccgctgctgctgg

SEQ ID NO: 4737 - DNA, 25 bp, Artificial
  primer
ctgttctggaggacgagccttctcc

SEQ ID NO: 4738 - DNA, 25 bp, Artificial
  primer
ttctggaggacgagccttctcctta

SEQ ID NO: 4739 - DNA, 25 bp, Artificial
  primer
ctgcccatctttccaggaagtcagg

SEQ ID NO: 4740 - DNA, 25 bp, Artificial
  primer
ctccagccccataaagagtgtcatg

SEQ ID NO: 4741 - DNA, 25 bp, Artificial
  primer
agagtgtcatgttagctgagtcacc

SEQ ID NO: 4742 - DNA, 25 bp, Artificial
  primer
gtgtcatgttagctgagtcaccatt

SEQ ID NO: 4743 - DNA, 25 bp, Artificial
  primer
tagctgagtcaccatttggcttcgg

SEQ ID NO: 4744 - DNA, 25 bp, Artificial
  primer
tcaccatttggcttcggcctggaaa

SEQ ID NO: 4745 - DNA, 25 bp, Artificial
  primer
catttggcttcggcctggaaatagt

SEQ ID NO: 4746 - DNA, 25 bp, Artificial
  primer
gaacactgatcgtgtgcgaggccag

SEQ ID NO: 4747 - DNA, 25 bp, Artificial
  primer
acccaactactctggtaccattgct

SEQ ID NO: 4748 - DNA, 25 bp, Artificial
  primer
agactggttgggccatggtgtctct

SEQ ID NO: 4749 - DNA, 25 bp, Artificial
  primer
ggtgtctctgtgtatagtctttgct

SEQ ID NO: 4750 - DNA, 25 bp, Artificial
  primer
ctttgctatgacttctggccagatg

SEQ ID NO: 4751 - DNA, 25 bp, Artificial
  primer
atgtggaaccatatccgtggacctc

SEQ ID NO: 4752 - DNA, 25 bp, Artificial
  primer
ggagcagccaggctcagtttgtggc

SEQ ID NO: 4753 - DNA, 25 bp, Artificial
  primer
tctggtactgaatgccgctatcacc

SEQ ID NO: 4754 - DNA, 25 bp, Artificial
  primer
cctagtgggattgggcctggtggtc

SEQ ID NO: 4755 - DNA, 25 bp, Artificial
  primer
cttcttcttcagttttctactttca

SEQ ID NO: 4756 - DNA, 25 bp, Artificial
  primer
ccaagtaccacggctatccttatag

SEQ ID NO: 4757 - DNA, 25 bp, Artificial
  primer
aactctataacctcagccttttaat

SEQ ID NO: 4758 - DNA, 25 bp, Artificial
  primer
gagggtattggtacatgacgacatg

SEQ ID NO: 4759 - DNA, 25 bp, Artificial
  primer
tttaaacacagcttactcttcctca

SEQ ID NO: 4760 - DNA, 25 bp, Artificial
  primer
atcaaaactaactacagccattctt

SEQ ID NO: 4761 - DNA, 25 bp, Artificial
  primer
cattctttttaaagcccaagggatg

SEQ ID NO: 4762 - DNA, 25 bp, Artificial
  primer
ggtgtaaggatgttacctgtttgtt

SEQ ID NO: 4763 - DNA, 25 bp, Artificial
  primer
gtagtatggtgagtaaggttatgcg

SEQ ID NO: 4764 - DNA, 25 bp, Artificial
  primer
ttctaacaaacactgccaacacgtc

SEQ ID NO: 4765 - DNA, 25 bp, Artificial
  primer
aacactgccaacacgtcaatttttt

SEQ ID NO: 4766 - DNA, 25 bp, Artificial
  primer
aagcgtgggccacattgctaagaat

SEQ ID NO: 4767 - DNA, 25 bp, Artificial
  primer
gccttattgatgttttgccgttcca

SEQ ID NO: 4768 - DNA, 25 bp, Artificial
  primer
gttttgccgttccaatgtatgcatt

SEQ ID NO: 4769 - DNA, 25 bp, Artificial
  primer
tgtatctctgcctgtgattttcttt

SEQ ID NO: 4770 - DNA, 25 bp, Artificial
  primer
gaaactccatgtagcaaccaggacg

SEQ ID NO: 4771 - DNA, 25 bp, Artificial
  primer
tgtgcctcagcctagatgttttgtc

SEQ ID NO: 4772 - DNA, 25 bp, Artificial
  primer
ttctcttttctgcacttaatacctg

SEQ ID NO: 4773 - DNA, 25 bp, Artificial
  primer
tgacagtatgaccgatctctgcgcc

SEQ ID NO: 4774 - DNA, 25 bp, Artificial
  primer
cgcctttctgggggcgggcaagctg

SEQ ID NO: 4775 - DNA, 25 bp, Artificial
  primer
gctggcggtagatttgtgatgtcac

SEQ ID NO: 4776 - DNA, 25 bp, Artificial
  primer
aacctttattccatgtgctttgctt

SEQ ID NO: 4777 - DNA, 25 bp, Artificial
  primer
cttcattctgtacatagctctttgg

SEQ ID NO: 4778 - DNA, 25 bp, Artificial
  primer
agctctttggctcgtgaacctaatt

SEQ ID NO: 4779 - DNA, 25 bp, Artificial
  primer
agggactgatgttctgtttcttgta

SEQ ID NO: 4780 - DNA, 25 bp, Artificial
  primer
catcgtgctgttcacgtcagacgcc

SEQ ID NO: 4781 - DNA, 25 bp, Artificial
  primer
gcagtgcgcactggaggagtacgtg

SEQ ID NO: 4782 - DNA, 25 bp, Artificial
  primer
agccgttttggcaaactgctgctgc

SEQ ID NO: 4783 - DNA, 25 bp, Artificial
  primer
gaaactctcatccgcgatatgttac

SEQ ID NO: 4784 - DNA, 25 bp, Artificial
  primer
tgtctgggagcagcttcaactggcc

SEQ ID NO: 4785 - DNA, 25 bp, Artificial
  primer
caactggccttacatgtccatccag

SEQ ID NO: 4786 - DNA, 25 bp, Artificial
  primer
ctagagactcagaggacccacctgg

SEQ ID NO: 4787 - DNA, 25 bp, Artificial
  primer
cgcggggacaccgggaagtgcagcg

SEQ ID NO: 4788 - DNA, 25 bp, Artificial
  primer
gagggccgagacaggagcagcccac

SEQ ID NO: 4789 - DNA, 25 bp, Artificial
  primer
gcccacccagcagaaatacaatccg

SEQ ID NO: 4790 - DNA, 25 bp, Artificial
  primer
ggatcagatctgtgagcacgttggc

SEQ ID NO: 4791 - DNA, 25 bp, Artificial
  primer
gatggctcggtgcggatgtttgacc

SEQ ID NO: 4792 - DNA, 25 bp, Artificial
  primer
acagcaccatcatttacgaagaccc

SEQ ID NO: 4793 - DNA, 25 bp, Artificial
  primer
catttacgaagacccacagcatcac

SEQ ID NO: 4794 - DNA, 25 bp, Artificial
  primer
tgcttcgcctctgctggaacaagca

SEQ ID NO: 4795 - DNA, 25 bp, Artificial
  primer
gagatcaacaatgtgcagtgggcat

SEQ ID NO: 4796 - DNA, 25 bp, Artificial
  primer
cagtgggcatcaactcagcccgact

SEQ ID NO: 4797 - DNA, 25 bp, Artificial
  primer
ccatctgctacaacaactgcctgga

SEQ ID NO: 4798 - DNA, 25 bp, Artificial
  primer
ctgcctggagatactcagagtgtag

SEQ ID NO: 4799 - DNA, 25 bp, Artificial
  primer
agagtgtagtgttggtggcgctgtg

SEQ ID NO: 4800 - DNA, 25 bp, Artificial
  primer
tgtgcccacgaggcaggggcttttg

SEQ ID NO: 4801 - DNA, 25 bp, Artificial
  primer
gcaggggcttttgtatttcctgcct

SEQ ID NO: 4802 - DNA, 25 bp, Artificial
  primer
agagagacacagctgcagaggccac

SEQ ID NO: 4803 - DNA, 25 bp, Artificial
  primer
acctggattgcgcctaatgtgtttg

SEQ ID NO: 4804 - DNA, 25 bp, Artificial
  primer
tgattgaatctacttgcacactctc

SEQ ID NO: 4805 - DNA, 25 bp, Artificial
  primer
gcacactctcccattatatttattg

SEQ ID NO: 4806 - DNA, 25 bp, Artificial
  primer
aacccaagttagttcaatcctgatt

SEQ ID NO: 4807 - DNA, 25 bp, Artificial
  primer
gaaggtttgcagatattctctagtc

SEQ ID NO: 4808 - DNA, 25 bp, Artificial
  primer
gacatatcacatgtcagccactgtg

SEQ ID NO: 4809 - DNA, 25 bp, Artificial
  primer
atggccagtaagatcaatgtgacgg

SEQ ID NO: 4810 - DNA, 25 bp, Artificial
  primer
tgtgacggcagggaaatgtatgtgt

SEQ ID NO: 4811 - DNA, 25 bp, Artificial
  primer
cagtgtgtggtcaacatttctcatg

SEQ ID NO: 4812 - DNA, 25 bp, Artificial
  primer
atgttaattatgcagtgtttccctc

SEQ ID NO: 4813 - DNA, 25 bp, Artificial
  primer
tggagcgaccccattacgctaaaga

SEQ ID NO: 4814 - DNA, 25 bp, Artificial
  primer
gagcgaccccattacgctaaagatg

SEQ ID NO: 4815 - DNA, 25 bp, Artificial
  primer
gaccccattacgctaaagatgaaag

SEQ ID NO: 4816 - DNA, 25 bp, Artificial
  primer
gagccaggatctccactgtggagca

SEQ ID NO: 4817 - DNA, 25 bp, Artificial
  primer
gaatgggaaattgcccaggtggacc

SEQ ID NO: 4818 - DNA, 25 bp, Artificial
  primer
accccaagaagaccattcagatggg

SEQ ID NO: 4819 - DNA, 25 bp, Artificial
  primer
gaccattcagatgggatctttccgg

SEQ ID NO: 4820 - DNA, 25 bp, Artificial
  primer
gatgggatctttccggatcaatcca

SEQ ID NO: 4821 - DNA, 25 bp, Artificial
  primer
ggatctttccggatcaatccagatg

SEQ ID NO: 4822 - DNA, 25 bp, Artificial
  primer
tttccggatcaatccagatggcagc

SEQ ID NO: 4823 - DNA, 25 bp, Artificial
  primer
tccagatggcagccagtcagtggtg

SEQ ID NO: 4824 - DNA, 25 bp, Artificial
  primer
cgaaggtgatcatcatccaggcctg

SEQ ID NO: 4825 - DNA, 25 bp, Artificial
  primer
acagccctggtgtggtgtggtttaa

SEQ ID NO: 4826 - DNA, 25 bp, Artificial
  primer
ggaaacctatctttaccaactacag

SEQ ID NO: 4827 - DNA, 25 bp, Artificial
  primer
gaaggattttatcgctttctgctct

SEQ ID NO: 4828 - DNA, 25 bp, Artificial
  primer
tttctgctcttccacaccagataat

SEQ ID NO: 4829 - DNA, 25 bp, Artificial
  primer
gagacatcccacaatgggctctgtt

SEQ ID NO: 4830 - DNA, 25 bp, Artificial
  primer
gaatatgcctgttcctgtgatgtgg

SEQ ID NO: 4831 - DNA, 25 bp, Artificial
  primer
tttccgcaaggttcgattttcattt

SEQ ID NO: 4832 - DNA, 25 bp, Artificial
  primer
gatggtagagcgcagatgcccacca

SEQ ID NO: 4833 - DNA, 25 bp, Artificial
  primer
tgacaagatgtttctacctcttccc

SEQ ID NO: 4834 - DNA, 25 bp, Artificial
  primer
ttctacctcttcccaggacattaaa

SEQ ID NO: 4835 - DNA, 25 bp, Artificial
  primer
acccccagctatcagacggtctggt

SEQ ID NO: 4836 - DNA, 25 bp, Artificial
  primer
aggccaaagcagcgtctttcagtgc

SEQ ID NO: 4837 - DNA, 25 bp, Artificial
  primer
gctggtggaggacatgctgctcagt

SEQ ID NO: 4838 - DNA, 25 bp, Artificial
  primer
tgctcagttcctccaggacatgaga

SEQ ID NO: 4839 - DNA, 25 bp, Artificial
  primer
ggaacttcctgtgctcattagagtc

SEQ ID NO: 4840 - DNA, 25 bp, Artificial
  primer
attagagtcaaatccctcagtccgt

SEQ ID NO: 4841 - DNA, 25 bp, Artificial
  primer
atgacgcctgtgtgaaagctctggt

SEQ ID NO: 4842 - DNA, 25 bp, Artificial
  primer
tggtctccctgaggagctaccatct

SEQ ID NO: 4843 - DNA, 25 bp, Artificial
  primer
gagctaccatctgcaaatcgtgact

SEQ ID NO: 4844 - DNA, 25 bp, Artificial
  primer
catcctgattcctgcaagccagcag

SEQ ID NO: 4845 - DNA, 25 bp, Artificial
  primer
gaataagacctctgaagacccttca

SEQ ID NO: 4846 - DNA, 25 bp, Artificial
  primer
gcgtaagagggctctggtcttccaa

SEQ ID NO: 4847 - DNA, 25 bp, Artificial
  primer
tttgagcatcgaatccccaaggaac

SEQ ID NO: 4848 - DNA, 25 bp, Artificial
  primer
aactgaggcccatcctcaaaatcct

SEQ ID NO: 4849 - DNA, 25 bp, Artificial
  primer
tgacttggacacttcagaccatgcc

SEQ ID NO: 4850 - DNA, 25 bp, Artificial
  primer
tgccgtctaaacctctctggagtga

SEQ ID NO: 4851 - DNA, 25 bp, Artificial
  primer
agctcacaccctaataagtccacat

SEQ ID NO: 4852 - DNA, 25 bp, Artificial
  primer
aagtccacatcttctcagtgtttta

SEQ ID NO: 4853 - DNA, 25 bp, Artificial
  primer
tattctgtaccttgcagccatgacc

SEQ ID NO: 4854 - DNA, 25 bp, Artificial
  primer
cccagctttatctgtcacacaaggc

SEQ ID NO: 4855 - DNA, 25 bp, Artificial
  primer
gctactgctagatatcacttactca

SEQ ID NO: 4856 - DNA, 25 bp, Artificial
  primer
aagagtcttggttcctctactactt

SEQ ID NO: 4857 - DNA, 25 bp, Artificial
  primer
gagacttttctatggttttgtgact

SEQ ID NO: 4858 - DNA, 25 bp, Artificial
  primer
gtgactttcaacttttgtacagtta

SEQ ID NO: 4859 - DNA, 25 bp, Artificial
  primer
gacaatcagaattccactgcccaaa

SEQ ID NO: 4860 - DNA, 25 bp, Artificial
  primer
ggctggttaccatcggagtttacaa

SEQ ID NO: 4861 - DNA, 25 bp, Artificial
  primer
tgctttcacgttcttacttgttgta

SEQ ID NO: 4862 - DNA, 25 bp, Artificial
  primer
tacattcatgcatttctaggctaga

SEQ ID NO: 4863 - DNA, 25 bp, Artificial
  primer
agagaaccttctagatttgatgctt

SEQ ID NO: 4864 - DNA, 25 bp, Artificial
  primer
gtctctagaagttatctgtctgtat

SEQ ID NO: 4865 - DNA, 25 bp, Artificial
  primer
ctgtctgtattgatctttatgctat

SEQ ID NO: 4866 - DNA, 25 bp, Artificial
  primer
gctatattactatctgtggttacag

SEQ ID NO: 4867 - DNA, 25 bp, Artificial
  primer
tactggagtcaagcccttataagtc

SEQ ID NO: 4868 - DNA, 25 bp, Artificial
  primer
gccctcttgatggatcacgtaaaac

SEQ ID NO: 4869 - DNA, 25 bp, Artificial
  primer
aaggcagcggggagcagacaaagat

SEQ ID NO: 4870 - DNA, 25 bp, Artificial
  primer
agatgaggtctacactgtccttcat

SEQ ID NO: 4871 - DNA, 25 bp, Artificial
  primer
gtctacactgtccttcatggggatt

SEQ ID NO: 4872 - DNA, 25 bp, Artificial
  primer
actgtccttcatggggattaaagct

SEQ ID NO: 4873 - DNA, 25 bp, Artificial
  primer
gctatggttatattagcaccaaact

SEQ ID NO: 4874 - DNA, 25 bp, Artificial
  primer
accctagaagggcccaaatgagaga

SEQ ID NO: 4875 - DNA, 25 bp, Artificial
  primer
atgagagaatggtacttagggatgg

SEQ ID NO: 4876 - DNA, 25 bp, Artificial
  primer
gtgtatatatggttttgtcaggtgt

SEQ ID NO: 4877 - DNA, 25 bp, Artificial
  primer
ggttttgtcaggtgtgtaaatttgc

SEQ ID NO: 4878 - DNA, 25 bp, Artificial
  primer
aattgtttcctttatatatgtatgt

SEQ ID NO: 4879 - DNA, 25 bp, Artificial
  primer
cattctgatgtctggagcttaggaa

SEQ ID NO: 4880 - DNA, 25 bp, Artificial
  primer
ctccagcttctgcagtgcattgttg

SEQ ID NO: 4881 - DNA, 25 bp, Artificial
  primer
ttgttgatgaggattcgcccgtcct

SEQ ID NO: 4882 - DNA, 25 bp, Artificial
  primer
cccgtccttccagttggagagttct

SEQ ID NO: 4883 - DNA, 25 bp, Artificial
  primer
ggagagttctcggagccatttgtac

SEQ ID NO: 4884 - DNA, 25 bp, Artificial
  primer
ggagccatttgtacatttcatcact

SEQ ID NO: 4885 - DNA, 25 bp, Artificial
  primer
acatttcatcactcagtgtatgcga

SEQ ID NO: 4886 - DNA, 25 bp, Artificial
  primer
gccaaaagaaaggccagcacctgaa

SEQ ID NO: 4887 - DNA, 25 bp, Artificial
  primer
gcacctgaagaattgatgggccacc

SEQ ID NO: 4888 - DNA, 25 bp, Artificial
  primer
aagaattgatgggccacccgttcat

SEQ ID NO: 4889 - DNA, 25 bp, Artificial
  primer
atgatggaaatgccgccgtggtgtc

SEQ ID NO: 4890 - DNA, 25 bp, Artificial
  primer
acacagatccaggtagtctctgcta

SEQ ID NO: 4891 - DNA, 25 bp, Artificial
  primer
gtctctgctagtaatgagccccttg

SEQ ID NO: 4892 - DNA, 25 bp, Artificial
  primer
agcacagacagcaggcatagccgca

SEQ ID NO: 4893 - DNA, 25 bp, Artificial
  primer
agccgcagcggcgagagctaaacaa

SEQ ID NO: 4894 - DNA, 25 bp, Artificial
  primer
caaaagggcgtgatccacatccgag

SEQ ID NO: 4895 - DNA, 25 bp, Artificial
  primer
ttgtctgccatgcacggactgatca

SEQ ID NO: 4896 - DNA, 25 bp, Artificial
  primer
ggactgatcatgggcggcctggaag

SEQ ID NO: 4897 - DNA, 25 bp, Artificial
  primer
ctcagctccagtgggaccttgtaaa

SEQ ID NO: 4898 - DNA, 25 bp, Artificial
  primer
ggaccttgtaaaatgctccctgtca

SEQ ID NO: 4899 - DNA, 25 bp, Artificial
  primer
tccctgtcagagctctccagaatat

SEQ ID NO: 4900 - DNA, 25 bp, Artificial
  primer
ggtgtgccccagaagtaagctttgc

SEQ ID NO: 4901 - DNA, 25 bp, Artificial
  primer
attgtgtctcctagttggtacctgg

SEQ ID NO: 4902 - DNA, 25 bp, Artificial
  primer
cctgggagcaattgacatgccccct

SEQ ID NO: 4903 - DNA, 25 bp, Artificial
  primer
agctggcctgacggtatggctgcag

SEQ ID NO: 4904 - DNA, 25 bp, Artificial
  primer
tgagcagtagcggtactcagccaga

SEQ ID NO: 4905 - DNA, 25 bp, Artificial
  primer
gagggaagagtccacagctttctgg

SEQ ID NO: 4906 - DNA, 25 bp, Artificial
  primer
gtggtagaaaagtgtgccccaagcc

SEQ ID NO: 4907 - DNA, 25 bp, Artificial
  primer
ccccaagccttcatggacgagttat

SEQ ID NO: 4908 - DNA, 25 bp, Artificial
  primer
tagtctcctcttgtttggattccat

SEQ ID NO: 4909 - DNA, 25 bp, Artificial
  primer
ggattccatacttgctaaataacct

SEQ ID NO: 4910 - DNA, 25 bp, Artificial
  primer
aacctggttttccatgtaactgcct

SEQ ID NO: 4911 - DNA, 25 bp, Artificial
  primer
gaaaatgtactgttcatgctgacac

SEQ ID NO: 4912 - DNA, 25 bp, Artificial
  primer
gatgctggtgttggtgtgacataat

SEQ ID NO: 4913 - DNA, 25 bp, Artificial
  primer
ataatgctatggccagaactgaaac

SEQ ID NO: 4914 - DNA, 25 bp, Artificial
  primer
ggctcccacagttagaaggcgaagt

SEQ ID NO: 4915 - DNA, 25 bp, Artificial
  primer
ggcgaagtcgcacaataggccgtct

SEQ ID NO: 4916 - DNA, 25 bp, Artificial
  primer
gccgtctgcaagctgggttagagag

SEQ ID NO: 4917 - DNA, 25 bp, Artificial
  primer
agccagtagtggctcagcctgagtt

SEQ ID NO: 4918 - DNA, 25 bp, Artificial
  primer
aacccactggtgcaagtcctagatt

SEQ ID NO: 4919 - DNA, 25 bp, Artificial
  primer
gaagaacctggagtctgatgtccaa

SEQ ID NO: 4920 - DNA, 25 bp, Artificial
  primer
taccaaagaggctaccgattccttc

SEQ ID NO: 4921 - DNA, 25 bp, Artificial
  primer
tctgcaccttctaaacctagttctt

SEQ ID NO: 4922 - DNA, 25 bp, Artificial
  primer
gctttccattacatgagctgtctca

SEQ ID NO: 4923 - DNA, 25 bp, Artificial
  primer
gagttcattgctctcagtataagat

SEQ ID NO: 4924 - DNA, 25 bp, Artificial
  primer
aagtctgaggattttcgtcaacctt

SEQ ID NO: 4925 - DNA, 25 bp, Artificial
  primer
cgtcaaccttactgaaacacactgg

SEQ ID NO: 4926 - DNA, 25 bp, Artificial
  primer
aacacactggtgctttcatcatcag

SEQ ID NO: 4927 - DNA, 25 bp, Artificial
  primer
ttgtcgtggttaccagtgcagcctg

SEQ ID NO: 4928 - DNA, 25 bp, Artificial
  primer
aaattctgctatttgacacagcttt

SEQ ID NO: 4929 - DNA, 25 bp, Artificial
  primer
atggtttcatggacactgttgagca

SEQ ID NO: 4930 - DNA, 25 bp, Artificial
  primer
agtgtatggtgtgcttacctgtcca

SEQ ID NO: 4931 - DNA, 25 bp, Artificial
  primer
tacctgtccactctagagcattgct

SEQ ID NO: 4932 - DNA, 25 bp, Artificial
  primer
gagcattgcttacaggttttttgtt

SEQ ID NO: 4933 - DNA, 25 bp, Artificial
  primer
tgctatttcctggtacagtgtagtt

SEQ ID NO: 4934 - DNA, 25 bp, Artificial
  primer
aaaaattccagtcctcatatctttt

SEQ ID NO: 4935 - DNA, 25 bp, Artificial
  primer
ctagactttgcttccaatggtttct

SEQ ID NO: 4936 - DNA, 25 bp, Artificial
  primer
ttccagaccacttttcctagatgaa

SEQ ID NO: 4937 - DNA, 25 bp, Artificial
  primer
gctgcatgcagacaggactgcccgt

SEQ ID NO: 4938 - DNA, 25 bp, Artificial
  primer
gactgcccgtgctttgtggggaatc

SEQ ID NO: 4939 - DNA, 25 bp, Artificial
  primer
ttccgcagatctcatcactttgatt

SEQ ID NO: 4940 - DNA, 25 bp, Artificial
  primer
gtttatcgttcctgtaacttgttct

SEQ ID NO: 4941 - DNA, 25 bp, Artificial
  primer
aacttgttctacattccacagtctt

SEQ ID NO: 4942 - DNA, 25 bp, Artificial
  primer
attccacagtctttaccgttttatg

SEQ ID NO: 4943 - DNA, 25 bp, Artificial
  primer
caacaatccctgtccattgattcca

SEQ ID NO: 4944 - DNA, 25 bp, Artificial
  primer
gaactctttgttcatgccaattttg

SEQ ID NO: 4945 - DNA, 25 bp, Artificial
  primer
cagcagcagtggcctggaagacgcc

SEQ ID NO: 4946 - DNA, 25 bp, Artificial
  primer
gcagtggcctggaagacgccaccgc

SEQ ID NO: 4947 - DNA, 25 bp, Artificial
  primer
ttctcctgcgtctgtgtgcatagga

SEQ ID NO: 4948 - DNA, 25 bp, Artificial
  primer
cctgcgtctgtgtgcataggacatg

SEQ ID NO: 4949 - DNA, 25 bp, Artificial
  primer
gtctgtgtgcataggacatgatact

SEQ ID NO: 4950 - DNA, 25 bp, Artificial
  primer
gacatgatactaataaccacacggc

SEQ ID NO: 4951 - DNA, 25 bp, Artificial
  primer
aataaccacacggctggcgtgacct

SEQ ID NO: 4952 - DNA, 25 bp, Artificial
  primer
ccatgtgtaacttcctcacgttgtg

SEQ ID NO: 4953 - DNA, 25 bp, Artificial
  primer
tgtaacttcctcacgttgtgtgcga

SEQ ID NO: 4954 - DNA, 25 bp, Artificial
  primer
acttcctcacgttgtgtgcgataac

SEQ ID NO: 4955 - DNA, 25 bp, Artificial
  primer
gtgtgcgataacgtattttattgta

SEQ ID NO: 4956 - DNA, 25 bp, Artificial
  primer
aaggactggtatctttctgtgagca

SEQ ID NO: 4957 - DNA, 25 bp, Artificial
  primer
gataaagactgcatatccttgtgtc

SEQ ID NO: 4958 - DNA, 25 bp, Artificial
  primer
attgcattgattcttgatgctttct

SEQ ID NO: 4959 - DNA, 25 bp, Artificial
  primer
gatgctttcttagaggcctacatga

SEQ ID NO: 4960 - DNA, 25 bp, Artificial
  primer
gatttcttagattgctctgataaac

SEQ ID NO: 4961 - DNA, 25 bp, Artificial
  primer
agagggaacttttgtcagactctgc

SEQ ID NO: 4962 - DNA, 25 bp, Artificial
  primer
cagactctgcaacaaactcctagct

SEQ ID NO: 4963 - DNA, 25 bp, Artificial
  primer
aactcctagctctatccagagtgtc

SEQ ID NO: 4964 - DNA, 25 bp, Artificial
  primer
tccagagtgtcctctgctgctaaga

SEQ ID NO: 4965 - DNA, 25 bp, Artificial
  primer
gtatctttctcctcaaaagcctgga

SEQ ID NO: 4966 - DNA, 25 bp, Artificial
  primer
gggggtgcattagtcagaattctcc

SEQ ID NO: 4967 - DNA, 25 bp, Artificial
  primer
caccccagtccagccatgagggtat

SEQ ID NO: 4968 - DNA, 25 bp, Artificial
  primer
atgagggtatttccagcctattcca

SEQ ID NO: 4969 - DNA, 25 bp, Artificial
  primer
atttccagcctattccaatgactga

SEQ ID NO: 4970 - DNA, 25 bp, Artificial
  primer
caatgactgaaacccttcttggaag

SEQ ID NO: 4971 - DNA, 25 bp, Artificial
  primer
taatgtcggggacgtagggacgctt

SEQ ID NO: 4972 - DNA, 25 bp, Artificial
  primer
ctaggggccaagcagggttccagat

SEQ ID NO: 4973 - DNA, 25 bp, Artificial
  primer
agccttctgccagctttaaaaccct

SEQ ID NO: 4974 - DNA, 25 bp, Artificial
  primer
aaaacccttcactcaagcagcatta

SEQ ID NO: 4975 - DNA, 25 bp, Artificial
  primer
agcagcattactgtacatgcaatga

SEQ ID NO: 4976 - DNA, 25 bp, Artificial
  primer
catacacacaccttcctattataaa

SEQ ID NO: 4977 - DNA, 25 bp, Artificial
  primer
aagcatgacatctctttggcattcc

SEQ ID NO: 4978 - DNA, 25 bp, Artificial
  primer
cagaagctgaactggaagccccggg

SEQ ID NO: 4979 - DNA, 25 bp, Artificial
  primer
ggtcgctttcgatgagctggtgagg

SEQ ID NO: 4980 - DNA, 25 bp, Artificial
  primer
gtggagctcatgaggacaaacccca

SEQ ID NO: 4981 - DNA, 25 bp, Artificial
  primer
tgcagacgcgctgcggggatgggga

SEQ ID NO: 4982 - DNA, 25 bp, Artificial
  primer
ccgccgaggtttgtagcagccggga

SEQ ID NO: 4983 - DNA, 25 bp, Artificial
  primer
ttgtagcagccgggatgtgaccctc

SEQ ID NO: 4984 - DNA, 25 bp, Artificial
  primer
tttgggtcgctttgcgtttgtcgaa

SEQ ID NO: 4985 - DNA, 25 bp, Artificial
  primer
tttgtcgaagcctcctctgaatggc

SEQ ID NO: 4986 - DNA, 25 bp, Artificial
  primer
gtcgaagcctcctctgaatggcttt

SEQ ID NO: 4987 - DNA, 25 bp, Artificial
  primer
aatcacattcactttacttgaaatt

SEQ ID NO: 4988 - DNA, 25 bp, Artificial
  primer
caaattgtggggccttcaaattgtt

SEQ ID NO: 4989 - DNA, 25 bp, Artificial
  primer
ccattgccccatgtgaagtcactgt

SEQ ID NO: 4990 - DNA, 25 bp, Artificial
  primer
ccccatgtgaagtcactgtgccagc

SEQ ID NO: 4991 - DNA, 25 bp, Artificial
  primer
ccagcccagaacactggtctcgggc

SEQ ID NO: 4992 - DNA, 25 bp, Artificial
  primer
agcccagaacactggtctcgggccc

SEQ ID NO: 4993 - DNA, 25 bp, Artificial
  primer
gaacactggtctcgggcccgagaag

SEQ ID NO: 4994 - DNA, 25 bp, Artificial
  primer
tggtctcgggcccgagaagacctcc

SEQ ID NO: 4995 - DNA, 25 bp, Artificial
  primer
tttttccaggctttaggtatcacca

SEQ ID NO: 4996 - DNA, 25 bp, Artificial
  primer
ggtatcaccactaaaatctccaggg

SEQ ID NO: 4997 - DNA, 25 bp, Artificial
  primer
caccactaaaatctccaggggcacc

SEQ ID NO: 4998 - DNA, 25 bp, Artificial
  primer
taaaatctccaggggcaccattgaa

SEQ ID NO: 4999 - DNA, 25 bp, Artificial
  primer
atctccaggggcaccattgaaatcc

SEQ ID NO: 5000 - DNA, 25 bp, Artificial
  primer
ctactactatacggctgcgagaaga

SEQ ID NO: 5001 - DNA, 25 bp, Artificial
  primer
atacggctgcgagaagacgacagaa

SEQ ID NO: 5002 - DNA, 25 bp, Artificial
  primer
gacgacagaagggctacgacgtggt

SEQ ID NO: 5003 - DNA, 25 bp, Artificial
  primer
agaagggctacgacgtggtggcggt

SEQ ID NO: 5004 - DNA, 25 bp, Artificial
  primer
ggtgtaccccaatgccaaggtggaa

SEQ ID NO: 5005 - DNA, 25 bp, Artificial
  primer
gtaccccaatgccaaggtggaactc

SEQ ID NO: 5006 - DNA, 25 bp, Artificial
  primer
atgccaaggtggaactcgtctgagc

SEQ ID NO: 5007 - DNA, 25 bp, Artificial
  primer
aggtggaactcgtctgagctgggac

SEQ ID NO: 5008 - DNA, 25 bp, Artificial
  primer
ccctgctcggccggtgtaaatatgt

SEQ ID NO: 5009 - DNA, 25 bp, Artificial
  primer
tgctcggccggtgtaaatatgtttc

SEQ ID NO: 5010 - DNA, 25 bp, Artificial
  primer
gtgtaaatatgtttcaccctgtccc

SEQ ID NO: 5011 - DNA, 25 bp, Artificial
  primer
ctcctcctgaaaaccaagctttgat

SEQ ID NO: 5012 - DNA, 25 bp, Artificial
  primer
cagaatgtcagattcctttcccttt

SEQ ID NO: 5013 - DNA, 25 bp, Artificial
  primer
gactgtacacactttatttacttcg

SEQ ID NO: 5014 - DNA, 25 bp, Artificial
  primer
agttcataacagtgccattgtcttt

SEQ ID NO: 5015 - DNA, 25 bp, Artificial
  primer
tagactagagaaaccgtcctctttt

SEQ ID NO: 5016 - DNA, 25 bp, Artificial
  primer
tcctctttttccatcataattctaa

SEQ ID NO: 5017 - DNA, 25 bp, Artificial
  primer
gatttgcccatttacacttttgaga

SEQ ID NO: 5018 - DNA, 25 bp, Artificial
  primer
gtgttttcagagcattagctgtcag

SEQ ID NO: 5019 - DNA, 25 bp, Artificial
  primer
tagctgtcagtgtattttccagttt

SEQ ID NO: 5020 - DNA, 25 bp, Artificial
  primer
ttccagttttgggtattgcagattt

SEQ ID NO: 5021 - DNA, 25 bp, Artificial
  primer
tgcagattttacatacaacttttat

SEQ ID NO: 5022 - DNA, 25 bp, Artificial
  primer
tatgactgctaaaagaaccaaccca

SEQ ID NO: 5023 - DNA, 25 bp, Artificial
  primer
aaagaaccaacccaggacagagcca

SEQ ID NO: 5024 - DNA, 25 bp, Artificial
  primer
acccaggacagagccacaatcttcc

SEQ ID NO: 5025 - DNA, 25 bp, Artificial
  primer
caggacagagccacaatcttcctct

SEQ ID NO: 5026 - DNA, 25 bp, Artificial
  primer
acagagccacaatcttcctctattt

SEQ ID NO: 5027 - DNA, 25 bp, Artificial
  primer
tttcacttgtattcatttgtaaaac

SEQ ID NO: 5028 - DNA, 25 bp, Artificial
  primer
tttgtattagtgtaacatactcccc

SEQ ID NO: 5029 - DNA, 25 bp, Artificial
  primer
aaacgcctgtaaagactggcatctt

SEQ ID NO: 5030 - DNA, 25 bp, Artificial
  primer
gcctgtaaagactggcatcttcaca

SEQ ID NO: 5031 - DNA, 25 bp, Artificial
  primer
gactggcatcttcacaggatgtcag

SEQ ID NO: 5032 - DNA, 25 bp, Artificial
  primer
atcttcacaggatgtcagtgtttaa

SEQ ID NO: 5033 - DNA, 25 bp, Artificial
  primer
gacaaccattatgacttttgcctca

SEQ ID NO: 5034 - DNA, 25 bp, Artificial
  primer
ttgcctcataccttgaatcctaaaa

SEQ ID NO: 5035 - DNA, 25 bp, Artificial
  primer
aaagttttcgctgaggttaatgtga

SEQ ID NO: 5036 - DNA, 25 bp, Artificial
  primer
gtgaacactgctttacaagcttgta

SEQ ID NO: 5037 - DNA, 25 bp, Artificial
  primer
gtgatttactttttctgtaagcctt

SEQ ID NO: 5038 - DNA, 25 bp, Artificial
  primer
gtttacacttaccagtttctaatgg

SEQ ID NO: 5039 - DNA, 25 bp, Artificial
  primer
gtctcagcctaaaagttacggtcag

SEQ ID NO: 5040 - DNA, 25 bp, Artificial
  primer
tacggtcagcatggcaattcaccta

SEQ ID NO: 5041 - DNA, 25 bp, Artificial
  primer
ctggactcaaaatctcagttgtctt

SEQ ID NO: 5042 - DNA, 25 bp, Artificial
  primer
tgtaggacctatcgtccagactcac

SEQ ID NO: 5043 - DNA, 25 bp, Artificial
  primer
cgtccagactcacagagtggggctc

SEQ ID NO: 5044 - DNA, 25 bp, Artificial
  primer
gaccaggtgtctagaggcaacagtg

SEQ ID NO: 5045 - DNA, 25 bp, Artificial
  primer
tagaggcaacagtgttctgagcccc

SEQ ID NO: 5046 - DNA, 25 bp, Artificial
  primer
ggctgggagaaggtgcttgggcttc

SEQ ID NO: 5047 - DNA, 25 bp, Artificial
  primer
tgcttgggcttctgcggtgaggcag

SEQ ID NO: 5048 - DNA, 25 bp, Artificial
  primer
gggcttctgcggtgaggcaggggag

SEQ ID NO: 5049 - DNA, 25 bp, Artificial
  primer
gaggcaggggagtctgcttgtctta

SEQ ID NO: 5050 - DNA, 25 bp, Artificial
  primer
ggggagtctgcttgtcttagatgtt

SEQ ID NO: 5051 - DNA, 25 bp, Artificial
  primer
gtcttagatgttggtggtgcagccc

SEQ ID NO: 5052 - DNA, 25 bp, Artificial
  primer
cagccccaggaccaagcttaaggag

SEQ ID NO: 5053 - DNA, 25 bp, Artificial
  primer
gaggagagcatctgctctgagacgg

SEQ ID NO: 5054 - DNA, 25 bp, Artificial
  primer
ggaaggagagaggttgaggatgcac

SEQ ID NO: 5055 - DNA, 25 bp, Artificial
  primer
cagaaaaactcattggttaccatca

SEQ ID NO: 5056 - DNA, 25 bp, Artificial
  primer
gttaccatcagagtttgctagggca

SEQ ID NO: 5057 - DNA, 25 bp, Artificial
  primer
gggcatcagattcttactctgaaga

SEQ ID NO: 5058 - DNA, 25 bp, Artificial
  primer
agaatataatatttatcctgccctt

SEQ ID NO: 5059 - DNA, 25 bp, Artificial
  primer
tcctgcccttcttgttatgaactgt

SEQ ID NO: 5060 - DNA, 25 bp, Artificial
  primer
ggaaaatttccagctaataggtgca

SEQ ID NO: 5061 - DNA, 25 bp, Artificial
  primer
gtagtgaatctagacagcagtattt

SEQ ID NO: 5062 - DNA, 25 bp, Artificial
  primer
tctgatcaaacccactgattgaaga

SEQ ID NO: 5063 - DNA, 25 bp, Artificial
  primer
gacagtcaattattgtgtacctcct

SEQ ID NO: 5064 - DNA, 25 bp, Artificial
  primer
gtgtacctcctggtttgatgcaaga

SEQ ID NO: 5065 - DNA, 25 bp, Artificial
  primer
gatgcaagagacagtacacaacagt

SEQ ID NO: 5066 - DNA, 25 bp, Artificial
  primer
ttccacctttatgttttaatatcct

SEQ ID NO: 5067 - DNA, 25 bp, Artificial
  primer
tgttttaatatcctaggcatctgct

SEQ ID NO: 5068 - DNA, 25 bp, Artificial
  primer
cctaggcatctgctgtaataatatt

SEQ ID NO: 5069 - DNA, 25 bp, Artificial
  primer
ataacttgtgttactaatttgtata

SEQ ID NO: 5070 - DNA, 25 bp, Artificial
  primer
taatttgtataacccatatctgtgc

SEQ ID NO: 5071 - DNA, 25 bp, Artificial
  primer
tgtataacccatatctgtgcaatgg

SEQ ID NO: 5072 - DNA, 25 bp, Artificial
  primer
aagttgtttaactagactgcgtgtt

SEQ ID NO: 5073 - DNA, 25 bp, Artificial
  primer
actagactgcgtgttgtttttcccg

SEQ ID NO: 5074 - DNA, 25 bp, Artificial
  primer
gaatagtttggttcttcaaatctta

SEQ ID NO: 5075 - DNA, 25 bp, Artificial
  primer
caaatcttaagagaatccacataaa

SEQ ID NO: 5076 - DNA, 25 bp, Artificial
  primer
aaaattcacttctatatatacaatg

SEQ ID NO: 5077 - DNA, 25 bp, Artificial
  primer
gtccacagctgaggttgcctctgac

SEQ ID NO: 5078 - DNA, 25 bp, Artificial
  primer
aaaaggcttggctatggccctgtgt

SEQ ID NO: 5079 - DNA, 25 bp, Artificial
  primer
cttcgtcatctgtggatccatccag

SEQ ID NO: 5080 - DNA, 25 bp, Artificial
  primer
gaacagcggtatctgaagcccaggc

SEQ ID NO: 5081 - DNA, 25 bp, Artificial
  primer
agaggctccagagttgagcttgtcc

SEQ ID NO: 5082 - DNA, 25 bp, Artificial
  primer
gatgcccaagagcctggaggcactg

SEQ ID NO: 5083 - DNA, 25 bp, Artificial
  primer
ctgcagaaacagtttctcctcctcc

SEQ ID NO: 5084 - DNA, 25 bp, Artificial
  primer
acatgaagcccctggcatttgctgg

SEQ ID NO: 5085 - DNA, 25 bp, Artificial
  primer
gatgggtagcactaagccagctggc

SEQ ID NO: 5086 - DNA, 25 bp, Artificial
  primer
agccagctggcctaaagatgcaata

SEQ ID NO: 5087 - DNA, 25 bp, Artificial
  primer
atgaacctcagcccattaggcagga

SEQ ID NO: 5088 - DNA, 25 bp, Artificial
  primer
ggaatgagttcttatctagtgttgc

SEQ ID NO: 5089 - DNA, 25 bp, Artificial
  primer
tcttatctagtgttgcaggccagca

SEQ ID NO: 5090 - DNA, 25 bp, Artificial
  primer
ggtttcgagagcattcctactcaca

SEQ ID NO: 5091 - DNA, 25 bp, Artificial
  primer
gagcattcctactcacataagtgaa

SEQ ID NO: 5092 - DNA, 25 bp, Artificial
  primer
tgagactaggtgctttgcttccttt

SEQ ID NO: 5093 - DNA, 25 bp, Artificial
  primer
gcttcctttcatcaggtatctttct

SEQ ID NO: 5094 - DNA, 25 bp, Artificial
  primer
aggtatctttctgtggcatttgaga

SEQ ID NO: 5095 - DNA, 25 bp, Artificial
  primer
ttactaaattatgaggctttgcttt

SEQ ID NO: 5096 - DNA, 25 bp, Artificial
  primer
taactagttttgtcattccatttgt

SEQ ID NO: 5097 - DNA, 25 bp, Artificial
  primer
gatacagtcaccaagaatgttttga

SEQ ID NO: 5098 - DNA, 25 bp, Artificial
  primer
agaccccaatttaagccttgcttat

SEQ ID NO: 5099 - DNA, 25 bp, Artificial
  primer
atgtacagctgcagcattcctgaaa

SEQ ID NO: 5100 - DNA, 25 bp, Artificial
  primer
gtaactcatcctaagtgggcacatt

SEQ ID NO: 5101 - DNA, 25 bp, Artificial
  primer
tgggcacatttagacatagcaggcg

SEQ ID NO: 5102 - DNA, 25 bp, Artificial
  primer
gcaggcgtgatgaccaacaaagatg

SEQ ID NO: 5103 - DNA, 25 bp, Artificial
  primer
gaagttccctatctacggaaaggca

SEQ ID NO: 5104 - DNA, 25 bp, Artificial
  primer
gaaaggcatgactgggaggcccaca

SEQ ID NO: 5105 - DNA, 25 bp, Artificial
  primer
ggcccacaaggactctcattgagtt

SEQ ID NO: 5106 - DNA, 25 bp, Artificial
  primer
gagttcttacttcgtttcagtcaag

SEQ ID NO: 5107 - DNA, 25 bp, Artificial
  primer
gacaatgcttagttcagatactcaa

SEQ ID NO: 5108 - DNA, 25 bp, Artificial
  primer
agaacttcctaatcacttttcagag

SEQ ID NO: 5109 - DNA, 25 bp, Artificial
  primer
gaaaattactatgcacttgtcagaa

SEQ ID NO: 5110 - DNA, 25 bp, Artificial
  primer
cttttttccttagaccttgctgaga

SEQ ID NO: 5111 - DNA, 25 bp, Artificial
  primer
accacacaaatctgtctcctgggtc

SEQ ID NO: 5112 - DNA, 25 bp, Artificial
  primer
taccactccccattagttaatttat

SEQ ID NO: 5113 - DNA, 25 bp, Artificial
  primer
gttgttctctcccttgagtaatctc

SEQ ID NO: 5114 - DNA, 25 bp, Artificial
  primer
acctgccccaggattacacatgggt

SEQ ID NO: 5115 - DNA, 25 bp, Artificial
  primer
ggtagagcctgcaagacctgagacc

SEQ ID NO: 5116 - DNA, 25 bp, Artificial
  primer
gacctgagaccttccaattgctggt

SEQ ID NO: 5117 - DNA, 25 bp, Artificial
  primer
cagagtggcccacagacattgcttt

SEQ ID NO: 5118 - DNA, 25 bp, Artificial
  primer
gaattctacctgtattccagggctg

SEQ ID NO: 5119 - DNA, 25 bp, Artificial
  primer
agggctggaccacttgataacttcc

SEQ ID NO: 5120 - DNA, 25 bp, Artificial
  primer
aacttccagtgtcctggcagctttt

SEQ ID NO: 5121 - DNA, 25 bp, Artificial
  primer
ggatctctttattgcacagactgaa

SEQ ID NO: 5122 - DNA, 25 bp, Artificial
  primer
tgtgaagcagtgggtgtccacccgt

SEQ ID NO: 5123 - DNA, 25 bp, Artificial
  primer
tgtggtcaccgagtgaggaccctcc

SEQ ID NO: 5124 - DNA, 25 bp, Artificial
  primer
ctgcctccacctgagagttgctagg

SEQ ID NO: 5125 - DNA, 25 bp, Artificial
  primer
gttgctagggggttcttgtcgagat

SEQ ID NO: 5126 - DNA, 25 bp, Artificial
  primer
tgtcgagatcatgtcatcagcaccc

SEQ ID NO: 5127 - DNA, 25 bp, Artificial
  primer
cctaagtcaagtcacgggtttccat

SEQ ID NO: 5128 - DNA, 25 bp, Artificial
  primer
gggtttccatagccaggcagttggt

SEQ ID NO: 5129 - DNA, 25 bp, Artificial
  primer
tggtatgtacaattcagttcagcgt

SEQ ID NO: 5130 - DNA, 25 bp, Artificial
  primer
tcagcgtatgaacttgtatctctaa

SEQ ID NO: 5131 - DNA, 25 bp, Artificial
  primer
gtatctctaatctgatgtccatttt

SEQ ID NO: 5132 - DNA, 25 bp, Artificial
  primer
ccaccggcgaaagagctttgacgcc

SEQ ID NO: 5133 - DNA, 25 bp, Artificial
  primer
cgaaagagctttgacgcctctgaca

SEQ ID NO: 5134 - DNA, 25 bp, Artificial
  primer
gtctgagaaaagctcagcccccagg

SEQ ID NO: 5135 - DNA, 25 bp, Artificial
  primer
taggttgggcaggtgggtggaccca

SEQ ID NO: 5136 - DNA, 25 bp, Artificial
  primer
aggtgggtggacccaagcttgtctg

SEQ ID NO: 5137 - DNA, 25 bp, Artificial
  primer
ttgtctgctgcctgagttccagaga

SEQ ID NO: 5138 - DNA, 25 bp, Artificial
  primer
gtctgctgcctgagttccagagagg

SEQ ID NO: 5139 - DNA, 25 bp, Artificial
  primer
gagttccagagagggaggaccctgg

SEQ ID NO: 5140 - DNA, 25 bp, Artificial
  primer
cagagagggaggaccctggggtgga

SEQ ID NO: 5141 - DNA, 25 bp, Artificial
  primer
ggggtggagggtgagggattctgtg

SEQ ID NO: 5142 - DNA, 25 bp, Artificial
  primer
gtggagggtgagggattctgtggaa

SEQ ID NO: 5143 - DNA, 25 bp, Artificial
  primer
caatccggttttatgatcttttggc

SEQ ID NO: 5144 - DNA, 25 bp, Artificial
  primer
ggcccaacaggctattttatctctt

SEQ ID NO: 5145 - DNA, 25 bp, Artificial
  primer
acaccttcaaagttggagccgttgc

SEQ ID NO: 5146 - DNA, 25 bp, Artificial
  primer
tattactcggtccagttatcctcaa

SEQ ID NO: 5147 - DNA, 25 bp, Artificial
  primer
gagacctgttcacatggatcgagcc

SEQ ID NO: 5148 - DNA, 25 bp, Artificial
  primer
gagcctgcttattcaggtggtccac

SEQ ID NO: 5149 - DNA, 25 bp, Artificial
  primer
tgcaaccactggttatcctggcaaa

SEQ ID NO: 5150 - DNA, 25 bp, Artificial
  primer
ttcatcatttaggacaccctcagcc

SEQ ID NO: 5151 - DNA, 25 bp, Artificial
  primer
actctccctctgtgtgtaattggag

SEQ ID NO: 5152 - DNA, 25 bp, Artificial
  primer
gagaccacaagctgttgttttgggt

SEQ ID NO: 5153 - DNA, 25 bp, Artificial
  primer
aagtgttttctgtaccttagattca

SEQ ID NO: 5154 - DNA, 25 bp, Artificial
  primer
tggattgacaactttgcccacatct

SEQ ID NO: 5155 - DNA, 25 bp, Artificial
  primer
cacatctcggggttcatcagtggcc

SEQ ID NO: 5156 - DNA, 25 bp, Artificial
  primer
aaacgctgccagatcatcatctttc

SEQ ID NO: 5157 - DNA, 25 bp, Artificial
  primer
atctttcaggtggtcttcctgggcc

SEQ ID NO: 5158 - DNA, 25 bp, Artificial
  primer
atccccttcactgacaagttctgtg

SEQ ID NO: 5159 - DNA, 25 bp, Artificial
  primer
gaagtacgaactggacgctcagctc

SEQ ID NO: 5160 - DNA, 25 bp, Artificial
  primer
tacaggagtcacctgctccatgtgg

SEQ ID NO: 5161 - DNA, 25 bp, Artificial
  primer
ggcctgtttcctgaacacagacctc

SEQ ID NO: 5162 - DNA, 25 bp, Artificial
  primer
actgccgggcatttattatactact

SEQ ID NO: 5163 - DNA, 25 bp, Artificial
  primer
tacttcctgtcataaccttctaact

SEQ ID NO: 5164 - DNA, 25 bp, Artificial
  primer
cttgacgaccacctcatgtggccaa

SEQ ID NO: 5165 - DNA, 25 bp, Artificial
  primer
agcatactatgcagcgttgggaact

SEQ ID NO: 5166 - DNA, 25 bp, Artificial
  primer
cagcgttgggaactaggccacctat

SEQ ID NO: 5167 - DNA, 25 bp, Artificial
  primer
tgaactcttctctgtatgcactaat

SEQ ID NO: 5168 - DNA, 25 bp, Artificial
  primer
agaccctaaagatcgtccttctgct

SEQ ID NO: 5169 - DNA, 25 bp, Artificial
  primer
atgtctagtgatcatctcagctgaa

SEQ ID NO: 5170 - DNA, 25 bp, Artificial
  primer
gtgtggcttgcgtaaataactgttt

SEQ ID NO: 5171 - DNA, 25 bp, Artificial
  primer
gaggaccatagtttcttgttaacat

SEQ ID NO: 5172 - DNA, 25 bp, Artificial
  primer
aagcacttggaattgtactgggttt

SEQ ID NO: 5173 - DNA, 25 bp, Artificial
  primer
gtactttgatactgctcatgctgac

SEQ ID NO: 5174 - DNA, 25 bp, Artificial
  primer
tgctcatgctgacttaaaacactag

SEQ ID NO: 5175 - DNA, 25 bp, Artificial
  primer
ggatctactgacattagcactttgt

SEQ ID NO: 5176 - DNA, 25 bp, Artificial
  primer
gaacatgatgtcacttctactgaat

SEQ ID NO: 5177 - DNA, 25 bp, Artificial
  primer
ctactgaattagatccctttctgac

SEQ ID NO: 5178 - DNA, 25 bp, Artificial
  primer
gatccctttctgacaaacttatctg

SEQ ID NO: 5179 - DNA, 25 bp, Artificial
  primer
gttaatgaatacacccagggcacac

SEQ ID NO: 5180 - DNA, 25 bp, Artificial
  primer
cccagggcacacacggttgaagagg

SEQ ID NO: 5181 - DNA, 25 bp, Artificial
  primer
aacgaagacattctggacaatccat

SEQ ID NO: 5182 - DNA, 25 bp, Artificial
  primer
gaaacactgctggaccagtctttta

SEQ ID NO: 5183 - DNA, 25 bp, Artificial
  primer
gcaacagcaacttgatgctacatcc

SEQ ID NO: 5184 - DNA, 25 bp, Artificial
  primer
tgtatctgttaagtcatcgtcctgc

SEQ ID NO: 5185 - DNA, 25 bp, Artificial
  primer
ttaagtcatcgtcctgcaagcttgg

SEQ ID NO: 5186 - DNA, 25 bp, Artificial
  primer
gcaagcttggcgttactatgtattt

SEQ ID NO: 5187 - DNA, 25 bp, Artificial
  primer
ctacgtggagtcaccatgctgagtc

SEQ ID NO: 5188 - DNA, 25 bp, Artificial
  primer
cacacctgctatcgtggaacagcct

SEQ ID NO: 5189 - DNA, 25 bp, Artificial
  primer
acgggatgagtctgggtgacctctg

SEQ ID NO: 5190 - DNA, 25 bp, Artificial
  primer
gtgcgtttactgttatgtcggtcat

SEQ ID NO: 5191 - DNA, 25 bp, Artificial
  primer
gtcggtcatatgtctgtacgtgtcg

SEQ ID NO: 5192 - DNA, 25 bp, Artificial
  primer
tccagctttcctggttagcgcaacg

SEQ ID NO: 5193 - DNA, 25 bp, Artificial
  primer
acaggttaggtggcgcgaggctgcc

SEQ ID NO: 5194 - DNA, 25 bp, Artificial
  primer
cgctccgctttgctttgggattaat

SEQ ID NO: 5195 - DNA, 25 bp, Artificial
  primer
tctgcatctgctgagaggggcaccc

SEQ ID NO: 5196 - DNA, 25 bp, Artificial
  primer
ccccagccatatcttacactttggt

SEQ ID NO: 5197 - DNA, 25 bp, Artificial
  primer
gaatcgtgttcgtgtctgttttgct

SEQ ID NO: 5198 - DNA, 25 bp, Artificial
  primer
tttagtatgctacctcttctattga

SEQ ID NO: 5199 - DNA, 25 bp, Artificial
  primer
aaggatgaactcctaatgccctctg

SEQ ID NO: 5200 - DNA, 25 bp, Artificial
  primer
ctaatgccctctgttgtgacaacaa

SEQ ID NO: 5201 - DNA, 25 bp, Artificial
  primer
tatagcttgtgtaacttccttttca

SEQ ID NO: 5202 - DNA, 25 bp, Artificial
  primer
ttgtttcttatctcagtcatcacta

SEQ ID NO: 5203 - DNA, 25 bp, Artificial
  primer
cactatggtgcttctgacgttgatg

SEQ ID NO: 5204 - DNA, 25 bp, Artificial
  primer
gacgttgatgactgtcacactggat

SEQ ID NO: 5205 - DNA, 25 bp, Artificial
  primer
tggatcctcctcagaaactaccgga

SEQ ID NO: 5206 - DNA, 25 bp, Artificial
  primer
attggtgtgttttgtatcttgcttg

SEQ ID NO: 5207 - DNA, 25 bp, Artificial
  primer
atcttgcttgaacttcctgttcttc

SEQ ID NO: 5208 - DNA, 25 bp, Artificial
  primer
acttcctgttcttcttggtatactt

SEQ ID NO: 5209 - DNA, 25 bp, Artificial
  primer
ttatgattaatcaccatctgcctcc

SEQ ID NO: 5210 - DNA, 25 bp, Artificial
  primer
ccaggcctttcatctcatgacaaac

SEQ ID NO: 5211 - DNA, 25 bp, Artificial
  primer
atcgtgtcactctgttaaatgttca

SEQ ID NO: 5212 - DNA, 25 bp, Artificial
  primer
tgttcatactgtttcaagcccatat

SEQ ID NO: 5213 - DNA, 25 bp, Artificial
  primer
tgttgtctccatatcttgatggctt

SEQ ID NO: 5214 - DNA, 25 bp, Artificial
  primer
ggcttttgggagcatttcacacaag

SEQ ID NO: 5215 - DNA, 25 bp, Artificial
  primer
caggtttgtggttgaggacttctct

SEQ ID NO: 5216 - DNA, 25 bp, Artificial
  primer
ggacttctctgtccgatgtctacat

SEQ ID NO: 5217 - DNA, 25 bp, Artificial
  primer
gtctacattcaggttctgacttcat

SEQ ID NO: 5218 - DNA, 25 bp, Artificial
  primer
tccctgtctttttcagtgtctcata

SEQ ID NO: 5219 - DNA, 25 bp, Artificial
  primer
gtctcataaacgctactctggattg

SEQ ID NO: 5220 - DNA, 25 bp, Artificial
  primer
acctgtacacgttgattatttttgt

SEQ ID NO: 5221 - DNA, 25 bp, Artificial
  primer
gagtttaagctatcatttccagatg

SEQ ID NO: 5222 - DNA, 25 bp, Artificial
  primer
ggagagttccatagatgtctgttag

SEQ ID NO: 5223 - DNA, 25 bp, Artificial
  primer
atccttgttaattttctgtcttgtt

SEQ ID NO: 5224 - DNA, 25 bp, Artificial
  primer
taaagtctcccactattattatatg

SEQ ID NO: 5225 - DNA, 25 bp, Artificial
  primer
gtctaagtctccttgtaggtctcta

SEQ ID NO: 5226 - DNA, 25 bp, Artificial
  primer
gggtgctcctgtattaggtgcatac

SEQ ID NO: 5227 - DNA, 25 bp, Artificial
  primer
ttatataatgcccttctttgtcttt

SEQ ID NO: 5228 - DNA, 25 bp, Artificial
  primer
taaatattcctgtatccctttattt

SEQ ID NO: 5229 - DNA, 25 bp, Artificial
  primer
gtctttgcacgtgaggtgggtctcc

SEQ ID NO: 5230 - DNA, 25 bp, Artificial
  primer
ctgaatacagcacaccgatgggttt

SEQ ID NO: 5231 - DNA, 25 bp, Artificial
  primer
gtcagctggcttaccaggttttggg

SEQ ID NO: 5232 - DNA, 25 bp, Artificial
  primer
ttaccaggttttgggcctctcagaa

SEQ ID NO: 5233 - DNA, 25 bp, Artificial
  primer
tacatcggagttaccaggagctagt

SEQ ID NO: 5234 - DNA, 25 bp, Artificial
  primer
ggagctagtgaaggtctggcaccca

SEQ ID NO: 5235 - DNA, 25 bp, Artificial
  primer
agatccaggctgcgtatgaagtcct

SEQ ID NO: 5236 - DNA, 25 bp, Artificial
  primer
gtcctgagtcaacccaggaagccct

SEQ ID NO: 5237 - DNA, 25 bp, Artificial
  primer
cctgaggactgactcttcctagcag

SEQ ID NO: 5238 - DNA, 25 bp, Artificial
  primer
ctagcagagctgggcaacttgtccc

SEQ ID NO: 5239 - DNA, 25 bp, Artificial
  primer
ggcaacttgtcccaaatctagcttt

SEQ ID NO: 5240 - DNA, 25 bp, Artificial
  primer
ccaaatctagctttgcccacgaatg

SEQ ID NO: 5241 - DNA, 25 bp, Artificial
  primer
ttgcccacgaatggcatcccaacag

SEQ ID NO: 5242 - DNA, 25 bp, Artificial
  primer
tcttctgcaaatttccctttaaact

SEQ ID NO: 5243 - DNA, 25 bp, Artificial
  primer
tcctcctttaattaaatggactaca

SEQ ID NO: 5244 - DNA, 25 bp, Artificial
  primer
ggactacatgggggggtaatccagg

SEQ ID NO: 5245 - DNA, 25 bp, Artificial
  primer
gctttcccctgggcagatggtaggc

SEQ ID NO: 5246 - DNA, 25 bp, Artificial
  primer
ggcagatggtaggcagggagctggg

SEQ ID NO: 5247 - DNA, 25 bp, Artificial
  primer
atggggatcaccttgagtccatcca

SEQ ID NO: 5248 - DNA, 25 bp, Artificial
  primer
gaggtgatatcatccttttaagaag

SEQ ID NO: 5249 - DNA, 25 bp, Artificial
  primer
gtagaaagtgcccaaacagccatca

SEQ ID NO: 5250 - DNA, 25 bp, Artificial
  primer
caaacagccatcagttccatcctga

SEQ ID NO: 5251 - DNA, 25 bp, Artificial
  primer
tcagttccatcctgactgcttgtta

SEQ ID NO: 5252 - DNA, 25 bp, Artificial
  primer
tgactgcttgttaagaattctctgc

SEQ ID NO: 5253 - DNA, 25 bp, Artificial
  primer
cgccccctatttgtggactaaagat

SEQ ID NO: 5254 - DNA, 25 bp, Artificial
  primer
gatgaactctggtgtgcatgctatt

SEQ ID NO: 5255 - DNA, 25 bp, Artificial
  primer
aaggtctctatattaacgctggttt

SEQ ID NO: 5256 - DNA, 25 bp, Artificial
  primer
tcacatgttttgactctggcttgca

SEQ ID NO: 5257 - DNA, 25 bp, Artificial
  primer
tggcttgcagcaccattcggagtaa

SEQ ID NO: 5258 - DNA, 25 bp, Artificial
  primer
ggagtaaggatgacagcaggcccag

SEQ ID NO: 5259 - DNA, 25 bp, Artificial
  primer
agcaggcccagaaggtgttttactc

SEQ ID NO: 5260 - DNA, 25 bp, Artificial
  primer
cagcaattcactgtcatgcacctat

SEQ ID NO: 5261 - DNA, 25 bp, Artificial
  primer
ttcactgacgttactaagcattgca

SEQ ID NO: 5262 - DNA, 25 bp, Artificial
  primer
aaaccgtatactactttcactgcca

SEQ ID NO: 5263 - DNA, 25 bp, Artificial
  primer
ctactttcactgccatgacactagg

SEQ ID NO: 5264 - DNA, 25 bp, Artificial
  primer
aattctgatgtcgtacctaaggctt

SEQ ID NO: 5265 - DNA, 25 bp, Artificial
  primer
acctaaggcttgtccatctttgttg

SEQ ID NO: 5266 - DNA, 25 bp, Artificial
  primer
ttgttggaggtgccatggctcctgt

SEQ ID NO: 5267 - DNA, 25 bp, Artificial
  primer
tgaagttcactcttgattgcaccca

SEQ ID NO: 5268 - DNA, 25 bp, Artificial
  primer
attgcacccaccctgtagaagatgg

SEQ ID NO: 5269 - DNA, 25 bp, Artificial
  primer
ggagcaagagcaagatcaccgtgac

SEQ ID NO: 5270 - DNA, 25 bp, Artificial
  primer
atcaccgtgacatccgaggtgcctt

SEQ ID NO: 5271 - DNA, 25 bp, Artificial
  primer
gaataatctacgtgactggttgcgc

SEQ ID NO: 5272 - DNA, 25 bp, Artificial
  primer
ctggttgcgcgtagttgctaacagc

SEQ ID NO: 5273 - DNA, 25 bp, Artificial
  primer
tacgaattacgttacttccagatta

SEQ ID NO: 5274 - DNA, 25 bp, Artificial
  primer
tttatccttgtatctctgcagtgtg

SEQ ID NO: 5275 - DNA, 25 bp, Artificial
  primer
ggataattacagcctcatagcccct

SEQ ID NO: 5276 - DNA, 25 bp, Artificial
  primer
agccttcgtcatgggactcagtgac

SEQ ID NO: 5277 - DNA, 25 bp, Artificial
  primer
gcacaggactgtggcatttgcagca

SEQ ID NO: 5278 - DNA, 25 bp, Artificial
  primer
aaatcaccctagtgccatgtttggt

SEQ ID NO: 5279 - DNA, 25 bp, Artificial
  primer
tagaggacccttgttgtacttcttg

SEQ ID NO: 5280 - DNA, 25 bp, Artificial
  primer
gtccctgtggttgtcatagccagtc

SEQ ID NO: 5281 - DNA, 25 bp, Artificial
  primer
gtcagacttgatcactgacaccccg

SEQ ID NO: 5282 - DNA, 25 bp, Artificial
  primer
gacaccccgtacaacatattgcata

SEQ ID NO: 5283 - DNA, 25 bp, Artificial
  primer
taagatcctcgatctggtgttctct

SEQ ID NO: 5284 - DNA, 25 bp, Artificial
  primer
gttctctgcgtggctgttagggact

SEQ ID NO: 5285 - DNA, 25 bp, Artificial
  primer
gaacacttgtcacatgcttgatcag

SEQ ID NO: 5286 - DNA, 25 bp, Artificial
  primer
tcacctctagaatagccacccaaag

SEQ ID NO: 5287 - DNA, 25 bp, Artificial
  primer
agaccttcctgaggctgcctcagaa

SEQ ID NO: 5288 - DNA, 25 bp, Artificial
  primer
cctcagaagcaccacttgctgtttt

SEQ ID NO: 5289 - DNA, 25 bp, Artificial
  primer
gaagatagctgctgttcccatgatg

SEQ ID NO: 5290 - DNA, 25 bp, Artificial
  primer
tcccatgatgggcacatttcctgag

SEQ ID NO: 5291 - DNA, 25 bp, Artificial
  primer
actgatgagcatagagcacccctgc

SEQ ID NO: 5292 - DNA, 25 bp, Artificial
  primer
caggaaacctgaccggcaggggctc

SEQ ID NO: 5293 - DNA, 25 bp, Artificial
  primer
ctctggcttcctgaaagcttcacct

SEQ ID NO: 5294 - DNA, 25 bp, Artificial
  primer
tcttccctcgtttatatctcaactg

SEQ ID NO: 5295 - DNA, 25 bp, Artificial
  primer
gcaactcagactgtctggagcttgc

SEQ ID NO: 5296 - DNA, 25 bp, Artificial
  primer
gtttcagaactttccttaggacttg

SEQ ID NO: 5297 - DNA, 25 bp, Artificial
  primer
tctcactttgaggcacatttacatc

SEQ ID NO: 5298 - DNA, 25 bp, Artificial
  primer
tacatcaatgcttttgttcctctca

SEQ ID NO: 5299 - DNA, 25 bp, Artificial
  primer
aagcaagatgtgttccttattgtga

SEQ ID NO: 5300 - DNA, 25 bp, Artificial
  primer
gtgaagagcgacacaactgcctgct

SEQ ID NO: 5301 - DNA, 25 bp, Artificial
  primer
gctgcctttccacagctataatgga

SEQ ID NO: 5302 - DNA, 25 bp, Artificial
  primer
tggacatcaggttgactctaaatca

SEQ ID NO: 5303 - DNA, 25 bp, Artificial
  primer
gtgtgcacaatacttgtggcccaca

SEQ ID NO: 5304 - DNA, 25 bp, Artificial
  primer
gaccaggtaattactgcttgtctct

SEQ ID NO: 5305 - DNA, 25 bp, Artificial
  primer
ttactgcttgtctctcaaggctgct

SEQ ID NO: 5306 - DNA, 25 bp, Artificial
  primer
tcaaggctgctgtctttatcagcac

SEQ ID NO: 5307 - DNA, 25 bp, Artificial
  primer
ggttcagttgtacttgtcctgcaaa

SEQ ID NO: 5308 - DNA, 25 bp, Artificial
  primer
cctctgtcctcaaatgtccaaaatg

SEQ ID NO: 5309 - DNA, 25 bp, Artificial
  primer
ttggaggacctctgttcatatccca

SEQ ID NO: 5310 - DNA, 25 bp, Artificial
  primer
ggctcttgccagcagtggagttact

SEQ ID NO: 5311 - DNA, 25 bp, Artificial
  primer
gagttactgtagagggatgtcccaa

SEQ ID NO: 5312 - DNA, 25 bp, Artificial
  primer
agagggatgtcccaagcttgttttc

SEQ ID NO: 5313 - DNA, 25 bp, Artificial
  primer
tttgaaactctcctgtgtctgtgtt

SEQ ID NO: 5314 - DNA, 25 bp, Artificial
  primer
gtgtgtgagagcacatcagtgtgtg

SEQ ID NO: 5315 - DNA, 25 bp, Artificial
  primer
gcacatcagtgtgtgcaggctgtgt

SEQ ID NO: 5316 - DNA, 25 bp, Artificial
  primer
tcccttcagacccatcattgagaac

SEQ ID NO: 5317 - DNA, 25 bp, Artificial
  primer
caggccctctgcgggggaaacaaga

SEQ ID NO: 5318 - DNA, 25 bp, Artificial
  primer
gggaaacaagatcacccagcatcct

SEQ ID NO: 5319 - DNA, 25 bp, Artificial
  primer
cgtcgacctccctatggattgttaa

SEQ ID NO: 5320 - DNA, 25 bp, Artificial
  primer
ggattgttaagggccctgtgcatat

SEQ ID NO: 5321 - DNA, 25 bp, Artificial
  primer
ggccctgtgcatatttgcatgtagc

SEQ ID NO: 5322 - DNA, 25 bp, Artificial
  primer
tgcatgtagccaaagattcagtctc

SEQ ID NO: 5323 - DNA, 25 bp, Artificial
  primer
gattcagtctcttgcaggaactctg

SEQ ID NO: 5324 - DNA, 25 bp, Artificial
  primer
gcaggaactctggttgtcaactggt

SEQ ID NO: 5325 - DNA, 25 bp, Artificial
  primer
tcaactggtgatcttgcctttgtct

SEQ ID NO: 5326 - DNA, 25 bp, Artificial
  primer
aggacaattttaccattctctcctg

SEQ ID NO: 5327 - DNA, 25 bp, Artificial
  primer
ttttagtgccggtacatgaatttgt

SEQ ID NO: 5328 - DNA, 25 bp, Artificial
  primer
tattctttataattccctttgaagt

SEQ ID NO: 5329 - DNA, 25 bp, Artificial
  primer
ggggaatctaaaaccgaccagatgt

SEQ ID NO: 5330 - DNA, 25 bp, Artificial
  primer
tccgagctaaaatcccagggaccgg

SEQ ID NO: 5331 - DNA, 25 bp, Artificial
  primer
ttacctgagcgaccaggactacatt

SEQ ID NO: 5332 - DNA, 25 bp, Artificial
  primer
gcctgctgggacttgtagttgccta

SEQ ID NO: 5333 - DNA, 25 bp, Artificial
  primer
tgctgggacttgtagttgcctagac

SEQ ID NO: 5334 - DNA, 25 bp, Artificial
  primer
tgggacttgtagttgcctagacagg

SEQ ID NO: 5335 - DNA, 25 bp, Artificial
  primer
tgtagttgcctagacagggcaccac

SEQ ID NO: 5336 - DNA, 25 bp, Artificial
  primer
gtagttgcctagacagggcaccacc

SEQ ID NO: 5337 - DNA, 25 bp, Artificial
  primer
aggcgttggtgtctcctggatgcta

SEQ ID NO: 5338 - DNA, 25 bp, Artificial
  primer
ggcgttggtgtctcctggatgctac

SEQ ID NO: 5339 - DNA, 25 bp, Artificial
  primer
gcgttggtgtctcctggatgctact

SEQ ID NO: 5340 - DNA, 25 bp, Artificial
  primer
cgttggtgtctcctggatgctacta

SEQ ID NO: 5341 - DNA, 25 bp, Artificial
  primer
gggaggcctgagcttggatttacac

SEQ ID NO: 5342 - DNA, 25 bp, Artificial
  primer
ggaggcctgagcttggatttacact

SEQ ID NO: 5343 - DNA, 25 bp, Artificial
  primer
ggcctgagcttggatttacactgta

SEQ ID NO: 5344 - DNA, 25 bp, Artificial
  primer
ctgagcttggatttacactgtaata

SEQ ID NO: 5345 - DNA, 25 bp, Artificial
  primer
cttggatttacactgtaataaagac

SEQ ID NO: 5346 - DNA, 25 bp, Artificial
  primer
ctggagtccctggtgactccattct

SEQ ID NO: 5347 - DNA, 25 bp, Artificial
  primer
gagtccctggtgactccattctgag

SEQ ID NO: 5348 - DNA, 25 bp, Artificial
  primer
gtccctggtgactccattctgaggt

SEQ ID NO: 5349 - DNA, 25 bp, Artificial
  primer
tccctggtgactccattctgaggtg

SEQ ID NO: 5350 - DNA, 25 bp, Artificial
  primer
ctggtgactccattctgaggtgtca

SEQ ID NO: 5351 - DNA, 25 bp, Artificial
  primer
ggtgactccattctgaggtgtcaca

SEQ ID NO: 5352 - DNA, 25 bp, Artificial
  primer
gactccattctgaggtgtcacaagc

SEQ ID NO: 5353 - DNA, 25 bp, Artificial
  primer
ctccattctgaggtgtcacaagcaa

SEQ ID NO: 5354 - DNA, 25 bp, Artificial
  primer
tccattctgaggtgtcacaagcaat

SEQ ID NO: 5355 - DNA, 25 bp, Artificial
  primer
attctgaggtgtcacaagcaatgaa

SEQ ID NO: 5356 - DNA, 25 bp, Artificial
  primer
ttctgaggtgtcacaagcaatgaag

SEQ ID NO: 5357 - DNA, 25 bp, Artificial
  primer
tctgaggtgtcacaagcaatgaagc

SEQ ID NO: 5358 - DNA, 25 bp, Artificial
  primer
tgaggtgtcacaagcaatgaagcta

SEQ ID NO: 5359 - DNA, 25 bp, Artificial
  primer
aggtgtcacaagcaatgaagctatg

SEQ ID NO: 5360 - DNA, 25 bp, Artificial
  primer
gtgtgacaggggaaccgtagacttt

SEQ ID NO: 5361 - DNA, 25 bp, Artificial
  primer
tgtgacaggggaaccgtagacttta

SEQ ID NO: 5362 - DNA, 25 bp, Artificial
  primer
gaaagaaattcttctagccatgttg

SEQ ID NO: 5363 - DNA, 25 bp, Artificial
  primer
attcttctagccatgttgatggtgg

SEQ ID NO: 5364 - DNA, 25 bp, Artificial
  primer
cttctagccatgttgatggtggaca

SEQ ID NO: 5365 - DNA, 25 bp, Artificial
  primer
ctagccatgttgatggtggacaagg

SEQ ID NO: 5366 - DNA, 25 bp, Artificial
  primer
cggtcaaaactcacgagtctggggg

SEQ ID NO: 5367 - DNA, 25 bp, Artificial
  primer
ggtcaaaactcacgagtctggggga

SEQ ID NO: 5368 - DNA, 25 bp, Artificial
  primer
gatcacccttcctggacgggactat

SEQ ID NO: 5369 - DNA, 25 bp, Artificial
  primer
cacccttcctggacgggactattga

SEQ ID NO: 5370 - DNA, 25 bp, Artificial
  primer
ttcctggacgggactattgaaggag

SEQ ID NO: 5371 - DNA, 25 bp, Artificial
  primer
ctcccctgggcctgaaaacttggag

SEQ ID NO: 5372 - DNA, 25 bp, Artificial
  primer
cctgggcctgaaaacttggagcaat

SEQ ID NO: 5373 - DNA, 25 bp, Artificial
  primer
ctgggcctgaaaacttggagcaatt

SEQ ID NO: 5374 - DNA, 25 bp, Artificial
  primer
aacacagtggcaagacaacattacc

SEQ ID NO: 5375 - DNA, 25 bp, Artificial
  primer
aacattacccaactatagaagagag

SEQ ID NO: 5376 - DNA, 25 bp, Artificial
  primer
tacccaactatagaagagaggctaa

SEQ ID NO: 5377 - DNA, 25 bp, Artificial
  primer
acccaactatagaagagaggctaac

SEQ ID NO: 5378 - DNA, 25 bp, Artificial
  primer
tctgcagcctacgcatgaataggtt

SEQ ID NO: 5379 - DNA, 25 bp, Artificial
  primer
gcagcctacgcatgaataggttggc

SEQ ID NO: 5380 - DNA, 25 bp, Artificial
  primer
gcatgaataggttggcaggtgtggg

SEQ ID NO: 5381 - DNA, 25 bp, Artificial
  primer
agcctgctgcaatccgtggaagagc

SEQ ID NO: 5382 - DNA, 25 bp, Artificial
  primer
gctgcaatccgtggaagagcccatg

SEQ ID NO: 5383 - DNA, 25 bp, Artificial
  primer
gcaatccgtggaagagcccatggtg

SEQ ID NO: 5384 - DNA, 25 bp, Artificial
  primer
tccgtggaagagcccatggtgcacc

SEQ ID NO: 5385 - DNA, 25 bp, Artificial
  primer
ccatgtccctctcagcagacaagtt

SEQ ID NO: 5386 - DNA, 25 bp, Artificial
  primer
atgtccctctcagcagacaagttcc

SEQ ID NO: 5387 - DNA, 25 bp, Artificial
  primer
tccctctcagcagacaagttccagg

SEQ ID NO: 5388 - DNA, 25 bp, Artificial
  primer
cctctcagcagacaagttccaggtc

SEQ ID NO: 5389 - DNA, 25 bp, Artificial
  primer
aagccatggcatatcagttatacag

SEQ ID NO: 5390 - DNA, 25 bp, Artificial
  primer
tgggaaacagtcttcaggagagcct

SEQ ID NO: 5391 - DNA, 25 bp, Artificial
  primer
tcatacagtctcaacagatcacccc

SEQ ID NO: 5392 - DNA, 25 bp, Artificial
  primer
ttgcccttcaagttctacttcagtt

SEQ ID NO: 5393 - DNA, 25 bp, Artificial
  primer
tgcagcactggctcagagggtcagg

SEQ ID NO: 5394 - DNA, 25 bp, Artificial
  primer
tcaggggctctctaaatacgtacag

SEQ ID NO: 5395 - DNA, 25 bp, Artificial
  primer
gattctgcgataatgtgtggacttt

SEQ ID NO: 5396 - DNA, 25 bp, Artificial
  primer
aatactggctccaatactacagaat

SEQ ID NO: 5397 - DNA, 25 bp, Artificial
  primer
caccatcttctgttattcattgctt

SEQ ID NO: 5398 - DNA, 25 bp, Artificial
  primer
gaaacttgtaactctgtagcctctt

SEQ ID NO: 5399 - DNA, 25 bp, Artificial
  primer
cctcttacatcacctttattataca

SEQ ID NO: 5400 - DNA, 25 bp, Artificial
  primer
aagctatcctttcatcgaggacagc

SEQ ID NO: 5401 - DNA, 25 bp, Artificial
  primer
acattatggtacagttggcttggaa

SEQ ID NO: 5402 - DNA, 25 bp, Artificial
  primer
ggcttggaattatgtctttctcttt

SEQ ID NO: 5403 - DNA, 25 bp, Artificial
  primer
gtgcgtacttgctaagatattcctg

SEQ ID NO: 5404 - DNA, 25 bp, Artificial
  primer
gatattcctgtggctcatgcgttac

SEQ ID NO: 5405 - DNA, 25 bp, Artificial
  primer
gcgttacaacacgaggacttaagcc

SEQ ID NO: 5406 - DNA, 25 bp, Artificial
  primer
aagccagtaatcgtttttgttcaga

SEQ ID NO: 5407 - DNA, 25 bp, Artificial
  primer
agaggtgtggaggtagagccagccc

SEQ ID NO: 5408 - DNA, 25 bp, Artificial
  primer
tgtctctccagctacattgtaagtt

SEQ ID NO: 5409 - DNA, 25 bp, Artificial
  primer
aaatgcccataaaaggtgcccataa

SEQ ID NO: 5410 - DNA, 25 bp, Artificial
  primer
agccctctcagacttgagcgttaat

SEQ ID NO: 5411 - DNA, 25 bp, Artificial
  primer
acaagttgacctccacggtgatgct

SEQ ID NO: 5412 - DNA, 25 bp, Artificial
  primer
gatgctgtggctgcagaccaacaaa

SEQ ID NO: 5413 - DNA, 25 bp, Artificial
  primer
gaccaacaaatctggctctggcacc

SEQ ID NO: 5414 - DNA, 25 bp, Artificial
  primer
ggcaccatgaacctcggaggcagcc

SEQ ID NO: 5415 - DNA, 25 bp, Artificial
  primer
tgaaactgtgagtgactgctcccca

SEQ ID NO: 5416 - DNA, 25 bp, Artificial
  primer
tccccacacatagccaacatcgggc

SEQ ID NO: 5417 - DNA, 25 bp, Artificial
  primer
acatcgggcgcctggtagaggacat

SEQ ID NO: 5418 - DNA, 25 bp, Artificial
  primer
ctgtttcatgctaaccagacacgcc

SEQ ID NO: 5419 - DNA, 25 bp, Artificial
  primer
tgcactcgttagattcctttcttag

SEQ ID NO: 5420 - DNA, 25 bp, Artificial
  primer
aacagctgcatcattgaccgcacag

SEQ ID NO: 5421 - DNA, 25 bp, Artificial
  primer
agaataaagccgatagccacctcct

SEQ ID NO: 5422 - DNA, 25 bp, Artificial
  primer
acacagatccaggtagtctctgcta

SEQ ID NO: 5423 - DNA, 25 bp, Artificial
  primer
gtctctgctagtaatgagccccttg

SEQ ID NO: 5424 - DNA, 25 bp, Artificial
  primer
agcacagacagcaggcatagccgca

SEQ ID NO: 5425 - DNA, 25 bp, Artificial
  primer
agccgcagcggcgagagctaaacaa

SEQ ID NO: 5426 - DNA, 25 bp, Artificial
  primer
caaaagggcgtgatccacatccgag

SEQ ID NO: 5427 - DNA, 25 bp, Artificial
  primer
ttgtctgccatgcacggactgatca

SEQ ID NO: 5428 - DNA, 25 bp, Artificial
  primer
ggactgatcatgggcggcctggaag

SEQ ID NO: 5429 - DNA, 25 bp, Artificial
  primer
ctcagctccagtgggaccttgtaaa

SEQ ID NO: 5430 - DNA, 25 bp, Artificial
  primer
ggaccttgtaaaatgctccctgtca

SEQ ID NO: 5431 - DNA, 25 bp, Artificial
  primer
tccctgtcagagctctccagaatat

SEQ ID NO: 5432 - DNA, 25 bp, Artificial
  primer
ggtgtgccccagaagtaagctttgc

SEQ ID NO: 5433 - DNA, 25 bp, Artificial
  primer
acaggtcttccagtcagctggtcat

SEQ ID NO: 5434 - DNA, 25 bp, Artificial
  primer
cagtaagaattgccagccactcatt

SEQ ID NO: 5435 - DNA, 25 bp, Artificial
  primer
ccactcattgtgcgggtctgcgtgg

SEQ ID NO: 5436 - DNA, 25 bp, Artificial
  primer
aagcctccactttctgtattatgtt

SEQ ID NO: 5437 - DNA, 25 bp, Artificial
  primer
gctgatgtagttctccatcttcaag

SEQ ID NO: 5438 - DNA, 25 bp, Artificial
  primer
caggaattctctgcactagctgtgc

SEQ ID NO: 5439 - DNA, 25 bp, Artificial
  primer
aactagcgctgctctggcattaatc

SEQ ID NO: 5440 - DNA, 25 bp, Artificial
  primer
aatcccaggaaccactagcagtagt

SEQ ID NO: 5441 - DNA, 25 bp, Artificial
  primer
cgccgccaatctaacatgagcacag

SEQ ID NO: 5442 - DNA, 25 bp, Artificial
  primer
agcacaggtgcttcatgacaaacat

SEQ ID NO: 5443 - DNA, 25 bp, Artificial
  primer
tcaactgcaccatgttctggcactg

SEQ ID NO: 5444 - DNA, 25 bp, Artificial
  primer
accctcttccacacatgtatgtgat

SEQ ID NO: 5445 - DNA, 25 bp, Artificial
  primer
aaaggatcttgttcccgatttgagc

SEQ ID NO: 5446 - DNA, 25 bp, Artificial
  primer
gttcccgatttgagcaacttctatg

SEQ ID NO: 5447 - DNA, 25 bp, Artificial
  primer
tttgagcaacttctatgcacagtac

SEQ ID NO: 5448 - DNA, 25 bp, Artificial
  primer
aggatgaatctcaggaaggcaagca

SEQ ID NO: 5449 - DNA, 25 bp, Artificial
  primer
gcagtccatagaagagcgtgagaaa

SEQ ID NO: 5450 - DNA, 25 bp, Artificial
  primer
aagagcgtgagaaactggacgggct

SEQ ID NO: 5451 - DNA, 25 bp, Artificial
  primer
ggaacggagacaaatatctggggcc

SEQ ID NO: 5452 - DNA, 25 bp, Artificial
  primer
atatctggggcctgcagttcttatg

SEQ ID NO: 5453 - DNA, 25 bp, Artificial
  primer
ctgcagttcttatgcaggcctatcg

SEQ ID NO: 5454 - DNA, 25 bp, Artificial
  primer
gatgacttcacagaggagcgcctgg

SEQ ID NO: 5455 - DNA, 25 bp, Artificial
  primer
agaaagaggcgctgctcactgtttt

SEQ ID NO: 5456 - DNA, 25 bp, Artificial
  primer
taatcaacgaacttctcttctccac

SEQ ID NO: 5457 - DNA, 25 bp, Artificial
  primer
ctccacccagagatggcttttccaa

SEQ ID NO: 5458 - DNA, 25 bp, Artificial
  primer
acaatggaatcttccctctgttctc

SEQ ID NO: 5459 - DNA, 25 bp, Artificial
  primer
ctctgataacctacttgcttactca

SEQ ID NO: 5460 - DNA, 25 bp, Artificial
  primer
caatgcctttaagccaagtcaccct

SEQ ID NO: 5461 - DNA, 25 bp, Artificial
  primer
ccaagtcaccctgttgcctatggga

SEQ ID NO: 5462 - DNA, 25 bp, Artificial
  primer
gatttggcaagctcaaccacatgct

SEQ ID NO: 5463 - DNA, 25 bp, Artificial
  primer
gttgtcaccaacagtctttctgcaa

SEQ ID NO: 5464 - DNA, 25 bp, Artificial
  primer
ggaaaaggcttaccaggctgctatg

SEQ ID NO: 5465 - DNA, 25 bp, Artificial
  primer
ggctgctatggtcaactcttcagaa

SEQ ID NO: 5466 - DNA, 25 bp, Artificial
  primer
agtgggtctcagctattagtgggag

SEQ ID NO: 5467 - DNA, 25 bp, Artificial
  primer
tcagctattagtgggagtgcaggta

SEQ ID NO: 5468 - DNA, 25 bp, Artificial
  primer
ggagtgcaggtaccacatactacgc

SEQ ID NO: 5469 - DNA, 25 bp, Artificial
  primer
caggtaccacatactacgcagactc

SEQ ID NO: 5470 - DNA, 25 bp, Artificial
  primer
tacgcagactccgtgaagggccggt

SEQ ID NO: 5471 - DNA, 25 bp, Artificial
  primer
ttcaccacctccagagacaattcca

SEQ ID NO: 5472 - DNA, 25 bp, Artificial
  primer
gacaattccaagaacacgctgtatc

SEQ ID NO: 5473 - DNA, 25 bp, Artificial
  primer
caagaacacgctgtatctgcaaatg

SEQ ID NO: 5474 - DNA, 25 bp, Artificial
  primer
ctgagagccgaggacacggccgtat

SEQ ID NO: 5475 - DNA, 25 bp, Artificial
  primer
gacacggccgtatattactgtgcga

SEQ ID NO: 5476 - DNA, 25 bp, Artificial
  primer
gccgtatattactgtgcgaaatccc

SEQ ID NO: 5477 - DNA, 25 bp, Artificial
  primer
atacttcaagtctcaggcccttaaa

SEQ ID NO: 5478 - DNA, 25 bp, Artificial
  primer
cttaaatctactccagcttccaggt

SEQ ID NO: 5479 - DNA, 25 bp, Artificial
  primer
tatttttaacactctgcagcagcag

SEQ ID NO: 5480 - DNA, 25 bp, Artificial
  primer
gtagtcctcaacagccaggggagca

SEQ ID NO: 5481 - DNA, 25 bp, Artificial
  primer
caagaacaggccttatctgctcagc

SEQ ID NO: 5482 - DNA, 25 bp, Artificial
  primer
cagtcacaggcagctgcagttgcga

SEQ ID NO: 5483 - DNA, 25 bp, Artificial
  primer
gcagttgcgattcttgcagcatcaa

SEQ ID NO: 5484 - DNA, 25 bp, Artificial
  primer
gcagcagcagcacaaacagctcagc

SEQ ID NO: 5485 - DNA, 25 bp, Artificial
  primer
agctcagctacatcatcatcggcat

SEQ ID NO: 5486 - DNA, 25 bp, Artificial
  primer
tcatcggcatacaggcagccagtca

SEQ ID NO: 5487 - DNA, 25 bp, Artificial
  primer
gtcttgcattactttttgttccttt

SEQ ID NO: 5488 - DNA, 25 bp, Artificial
  primer
atcttttctaactctgcttagctgc

SEQ ID NO: 5489 - DNA, 25 bp, Artificial
  primer
agctgctaataatcctgaggcatag

SEQ ID NO: 5490 - DNA, 25 bp, Artificial
  primer
tagtgattcacagtatccctcttag

SEQ ID NO: 5491 - DNA, 25 bp, Artificial
  primer
agtatccctcttagcattaatttaa

SEQ ID NO: 5492 - DNA, 25 bp, Artificial
  primer
gaggcagattgattttccctctttc

SEQ ID NO: 5493 - DNA, 25 bp, Artificial
  primer
cccaccatgtccttagatctaatct

SEQ ID NO: 5494 - DNA, 25 bp, Artificial
  primer
tagatctaatctgtgctaccttatt

SEQ ID NO: 5495 - DNA, 25 bp, Artificial
  primer
gctaccttattaactcacagcaggc

SEQ ID NO: 5496 - DNA, 25 bp, Artificial
  primer
acagcaggcttactgaatggcttca

SEQ ID NO: 5497 - DNA, 25 bp, Artificial
  primer
cagatttagttgatttctccaccaa

SEQ ID NO: 5498 - DNA, 25 bp, Artificial
  primer
gcatgtcatgtattctcaataggct

SEQ ID NO: 5499 - DNA, 25 bp, Artificial
  primer
atggcaaaaatctccagccctacag

SEQ ID NO: 5500 - DNA, 25 bp, Artificial
  primer
ctccagccctacagagactgagcgg

SEQ ID NO: 5501 - DNA, 25 bp, Artificial
  primer
gactgagcggtgcattgagtccctg

SEQ ID NO: 5502 - DNA, 25 bp, Artificial
  primer
agtccctgattgctgttttccagaa

SEQ ID NO: 5503 - DNA, 25 bp, Artificial
  primer
ggatggttacaaccgcaatctctcc

SEQ ID NO: 5504 - DNA, 25 bp, Artificial
  primer
caaccgcaatctctccaagacggag

SEQ ID NO: 5505 - DNA, 25 bp, Artificial
  primer
gacggagttcctaagcttcatgaat

SEQ ID NO: 5506 - DNA, 25 bp, Artificial
  primer
gagctggctgcctttacaaagaacc

SEQ ID NO: 5507 - DNA, 25 bp, Artificial
  primer
ccggtgtccttgaccacatgaagaa

SEQ ID NO: 5508 - DNA, 25 bp, Artificial
  primer
gatgtcagcagtgatgggcagttag

SEQ ID NO: 5509 - DNA, 25 bp, Artificial
  primer
aatctgattggtggcctagctgtgg

SEQ ID NO: 5510 - DNA, 25 bp, Artificial
  primer
atggctgaccggattctgaccatga

SEQ ID NO: 5511 - DNA, 25 bp, Artificial
  primer
ggcacgactagaagccctcaaaacc

SEQ ID NO: 5512 - DNA, 25 bp, Artificial
  primer
aaattggcatgttcagcttcactgg

SEQ ID NO: 5513 - DNA, 25 bp, Artificial
  primer
gctgccaagtggtcgaatcaacgtg

SEQ ID NO: 5514 - DNA, 25 bp, Artificial
  primer
ctccatccatgaagcagtcaccaaa

SEQ ID NO: 5515 - DNA, 25 bp, Artificial
  primer
tccagtgaagaaacaccacccgtcc

SEQ ID NO: 5516 - DNA, 25 bp, Artificial
  primer
gtccagtaccaccaaagtagttctc

SEQ ID NO: 5517 - DNA, 25 bp, Artificial
  primer
ctgcctgcacaaacctacatgtaca

SEQ ID NO: 5518 - DNA, 25 bp, Artificial
  primer
gactgaaaggctgctctggtgaggc

SEQ ID NO: 5519 - DNA, 25 bp, Artificial
  primer
taaaccggccccacatgaagagaac

SEQ ID NO: 5520 - DNA, 25 bp, Artificial
  primer
gagaacatcccttgagacgaatttg

SEQ ID NO: 5521 - DNA, 25 bp, Artificial
  primer
atgtggctgaagttacccgaagttc

SEQ ID NO: 5522 - DNA, 25 bp, Artificial
  primer
gttacccgaagttcagcttgcagtg

SEQ ID NO: 5523 - DNA, 25 bp, Artificial
  primer
agttcagcttgcagtgtaattcaga

SEQ ID NO: 5524 - DNA, 25 bp, Artificial
  primer
gaatcatacttcctttcaggtcaaa

SEQ ID NO: 5525 - DNA, 25 bp, Artificial
  primer
gtgggaaatatcctgttcgtgacct

SEQ ID NO: 5526 - DNA, 25 bp, Artificial
  primer
tcctgttcgtgacctaggagaaaca

SEQ ID NO: 5527 - DNA, 25 bp, Artificial
  primer
ttcttactccatacaagcagtttat

SEQ ID NO: 5528 - DNA, 25 bp, Artificial
  primer
aaacatgctacaggggcacattttc

SEQ ID NO: 5529 - DNA, 25 bp, Artificial
  primer
acaggggcacattttctgtggttaa

SEQ ID NO: 5530 - DNA, 25 bp, Artificial
  primer
gcagttttcctttgcattgagggtt

SEQ ID NO: 5531 - DNA, 25 bp, Artificial
  primer
ctttgcattgagggttttggctttt

SEQ ID NO: 5532 - DNA, 25 bp, Artificial
  primer
atgtttctgggcctaccaaggttca

SEQ ID NO: 5533 - DNA, 25 bp, Artificial
  primer
ctgggaatgtgactgctggagcctg

SEQ ID NO: 5534 - DNA, 25 bp, Artificial
  primer
tgagagtgtgtgttggtggctgtgc

SEQ ID NO: 5535 - DNA, 25 bp, Artificial
  primer
acaagacgggagtcaccctgtgctt

SEQ ID NO: 5536 - DNA, 25 bp, Artificial
  primer
ccaagatactgacccattgaacccc

SEQ ID NO: 5537 - DNA, 25 bp, Artificial
  primer
ttctctccacaaagtccgtggtgcc

SEQ ID NO: 5538 - DNA, 25 bp, Artificial
  primer
ggtgggctgcagacactaatggtgt

SEQ ID NO: 5539 - DNA, 25 bp, Artificial
  primer
ggtcttggaacagcttctctatgtg

SEQ ID NO: 5540 - DNA, 25 bp, Artificial
  primer
gcttctctatgtgtggattcgtgta

SEQ ID NO: 5541 - DNA, 25 bp, Artificial
  primer
aaccacctgtaattttgtaccatat

SEQ ID NO: 5542 - DNA, 25 bp, Artificial
  primer
gtaccatatgtgtctttccatcaaa

SEQ ID NO: 5543 - DNA, 25 bp, Artificial
  primer
attcctgttactgtattaacccttg

SEQ ID NO: 5544 - DNA, 25 bp, Artificial
  primer
ggaactctaagccatgccagaacac

SEQ ID NO: 5545 - DNA, 25 bp, Artificial
  primer
ccctagccccttgcagtgataaata

SEQ ID NO: 5546 - DNA, 25 bp, Artificial
  primer
gtgtttggtgttcttatctccaccc

SEQ ID NO: 5547 - DNA, 25 bp, Artificial
  primer
tcagacagatgcctcttgcttttaa

SEQ ID NO: 5548 - DNA, 25 bp, Artificial
  primer
acgtgttgtagggttcttggtctgt

SEQ ID NO: 5549 - DNA, 25 bp, Artificial
  primer
gagaaggaagtgagcccactgctct

SEQ ID NO: 5550 - DNA, 25 bp, Artificial
  primer
atgtgggtgagtccaccagaggccc

SEQ ID NO: 5551 - DNA, 25 bp, Artificial
  primer
ccagccctcgaggcagtgtgtgtgg

SEQ ID NO: 5552 - DNA, 25 bp, Artificial
  primer
atatgtaccctgcactcatgaatgt

SEQ ID NO: 5553 - DNA, 25 bp, Artificial
  primer
gaagtatttaacattctcccatccc

SEQ ID NO: 5554 - DNA, 25 bp, Artificial
  primer
attgacgaacacgtgacgcggtcgg

SEQ ID NO: 5555 - DNA, 25 bp, Artificial
  primer
cggaccactgcagactgagcggtgg

SEQ ID NO: 5556 - DNA, 25 bp, Artificial
  primer
gatcatgtttctccagtattacctc

SEQ ID NO: 5557 - DNA, 25 bp, Artificial
  primer
tgacccgatgggacaacagacctgc

SEQ ID NO: 5558 - DNA, 25 bp, Artificial
  primer
ggttctccccagatgacaaatactc

SEQ ID NO: 5559 - DNA, 25 bp, Artificial
  primer
tctcgacaccgaatcaccatcaaga

SEQ ID NO: 5560 - DNA, 25 bp, Artificial
  primer
gcttcaaggtgctcatgacccagca

SEQ ID NO: 5561 - DNA, 25 bp, Artificial
  primer
tgagggtcccttaaactgatgtctt

SEQ ID NO: 5562 - DNA, 25 bp, Artificial
  primer
gagactccgtaaccaaactcttcgg

SEQ ID NO: 5563 - DNA, 25 bp, Artificial
  primer
accaaactcttcggactgtgagccc

SEQ ID NO: 5564 - DNA, 25 bp, Artificial
  primer
gccatactctttggcatccagtctc

SEQ ID NO: 5565 - DNA, 25 bp, Artificial
  primer
attgactttgcagcagggtggcagg

SEQ ID NO: 5566 - DNA, 25 bp, Artificial
  primer
gtcctgcctagctcagatttcatgg

SEQ ID NO: 5567 - DNA, 25 bp, Artificial
  primer
cagatttcatggcacctgcacttga

SEQ ID NO: 5568 - DNA, 25 bp, Artificial
  primer
cacttctttatcacaggtgtcttga

SEQ ID NO: 5569 - DNA, 25 bp, Artificial
  primer
tagcttcttttaccaacctgagaaa

SEQ ID NO: 5570 - DNA, 25 bp, Artificial
  primer
gtatcttgctgtgtgtagtctcttg

SEQ ID NO: 5571 - DNA, 25 bp, Artificial
  primer
tcacacctttcttcactgagattcc

SEQ ID NO: 5572 - DNA, 25 bp, Artificial
  primer
tccagttcttcaagccataaatgac

SEQ ID NO: 5573 - DNA, 25 bp, Artificial
  primer
gattatttgactggaatgcttctta

SEQ ID NO: 5574 - DNA, 25 bp, Artificial
  primer
gaataactatactccgttatccacc

SEQ ID NO: 5575 - DNA, 25 bp, Artificial
  primer
tatccacccgatttcctaatgtaat

SEQ ID NO: 5576 - DNA, 25 bp, Artificial
  primer
atttctaaaacctgtgatgccctaa

SEQ ID NO: 5577 - DNA, 25 bp, Artificial
  primer
aggtggttgtagctgatgagttatt

SEQ ID NO: 5578 - DNA, 25 bp, Artificial
  primer
ttatgctaatttgtgagttctgatc

SEQ ID NO: 5579 - DNA, 25 bp, Artificial
  primer
tctgatcacttttgagctctgaagc

SEQ ID NO: 5580 - DNA, 25 bp, Artificial
  primer
gagctctgaagctttgaatcattca

SEQ ID NO: 5581 - DNA, 25 bp, Artificial
  primer
tcagtggtggagatggccttctggt

SEQ ID NO: 5582 - DNA, 25 bp, Artificial
  primer
ggagatggccttctggtaactgaat

SEQ ID NO: 5583 - DNA, 25 bp, Artificial
  primer
taactgaatattaccttctgtagga

SEQ ID NO: 5584 - DNA, 25 bp, Artificial
  primer
tgtgaatgactctgtgctggcaaaa

SEQ ID NO: 5585 - DNA, 25 bp, Artificial
  primer
aaacctctatatttctttcgttcat

SEQ ID NO: 5586 - DNA, 25 bp, Artificial
  primer
taacaaaagcatgcagttctctgtg

SEQ ID NO: 5587 - DNA, 25 bp, Artificial
  primer
caccatcacgtgcctggtgacgggc

SEQ ID NO: 5588 - DNA, 25 bp, Artificial
  primer
gacgtcttcgtgcagtggatgcaga

SEQ ID NO: 5589 - DNA, 25 bp, Artificial
  primer
gcagtggatgcagagggggcagccc

SEQ ID NO: 5590 - DNA, 25 bp, Artificial
  primer
gatgcagagggggcagcccttgtcc

SEQ ID NO: 5591 - DNA, 25 bp, Artificial
  primer
gcccttgtccccggagaagtatgtg

SEQ ID NO: 5592 - DNA, 25 bp, Artificial
  primer
ccggagaagtatgtgaccagcgccc

SEQ ID NO: 5593 - DNA, 25 bp, Artificial
  primer
catcctgaccgtgtccgaagaggaa

SEQ ID NO: 5594 - DNA, 25 bp, Artificial
  primer
gaccgtgtccgaagaggaatggaac

SEQ ID NO: 5595 - DNA, 25 bp, Artificial
  primer
tgcccaacagggtcaccgagaggac

SEQ ID NO: 5596 - DNA, 25 bp, Artificial
  primer
gtcaccgagaggaccgtggacaagt

SEQ ID NO: 5597 - DNA, 25 bp, Artificial
  primer
cgagaggaccgtggacaagtccacc

SEQ ID NO: 5598 - DNA, 25 bp, Artificial
  primer
cagcttcaagcagaggcctcggggt

SEQ ID NO: 5599 - DNA, 25 bp, Artificial
  primer
tgtagaaacactaacagctgggaga

SEQ ID NO: 5600 - DNA, 25 bp, Artificial
  primer
atcagggaggaacctccaatgggtg

SEQ ID NO: 5601 - DNA, 25 bp, Artificial
  primer
aggaggaagccactgcatctgttgg

SEQ ID NO: 5602 - DNA, 25 bp, Artificial
  primer
gcatctgttggctcagggccccagc

SEQ ID NO: 5603 - DNA, 25 bp, Artificial
  primer
cgcctgggctgttgtgtctcctgtc

SEQ ID NO: 5604 - DNA, 25 bp, Artificial
  primer
ctgttgtgtctcctgtctgtgccga

SEQ ID NO: 5605 - DNA, 25 bp, Artificial
  primer
gttgtgtctcctgtctgtgccgatc

SEQ ID NO: 5606 - DNA, 25 bp, Artificial
  primer
tgtctcctgtctgtgccgatctcta

SEQ ID NO: 5607 - DNA, 25 bp, Artificial
  primer
ctgtctgtgccgatctctattaaag

SEQ ID NO: 5608 - DNA, 25 bp, Artificial
  primer
gtctgtgccgatctctattaaagga

SEQ ID NO: 5609 - DNA, 25 bp, Artificial
  primer
ctgtgccgatctctattaaaggact

SEQ ID NO: 5610 - DNA, 25 bp, Artificial
  primer
gtgccgatctctattaaaggactcc

SEQ ID NO: 5611 - DNA, 25 bp, Artificial
  primer
gccgatctctattaaaggactccct

SEQ ID NO: 5612 - DNA, 25 bp, Artificial
  primer
ctctattaaaggactccctcttggt

SEQ ID NO: 5613 - DNA, 25 bp, Artificial
  primer
ctattaaaggactccctcttggtgg

SEQ ID NO: 5614 - DNA, 25 bp, Artificial
  primer
catgcaaaaatcgtctgcctggcct

SEQ ID NO: 5615 - DNA, 25 bp, Artificial
  primer
tggcctggtccccagacaatgaaca

SEQ ID NO: 5616 - DNA, 25 bp, Artificial
  primer
agacaatgaacactttgcctccggt

SEQ ID NO: 5617 - DNA, 25 bp, Artificial
  primer
actttgcctccggtggcatggacat

SEQ ID NO: 5618 - DNA, 25 bp, Artificial
  primer
gtgtatgtttggaccctgagtgacc

SEQ ID NO: 5619 - DNA, 25 bp, Artificial
  primer
aagatccaagatgcacaccggctgc

SEQ ID NO: 5620 - DNA, 25 bp, Artificial
  primer
atgatgcctctgtcaaggagtggac

SEQ ID NO: 5621 - DNA, 25 bp, Artificial
  primer
aggagtggacaatcacctactgagg

SEQ ID NO: 5622 - DNA, 25 bp, Artificial
  primer
ccgcctctggatggaccgaatcagg

SEQ ID NO: 5623 - DNA, 25 bp, Artificial
  primer
aactgcagcggaacatgtcatttct

SEQ ID NO: 5624 - DNA, 25 bp, Artificial
  primer
tcgtctctgcagggtgtctgtacac

SEQ ID NO: 5625 - DNA, 25 bp, Artificial
  primer
ccaggtgtggctttagctgttattc

SEQ ID NO: 5626 - DNA, 25 bp, Artificial
  primer
gtggctttagctgttattctctgta

SEQ ID NO: 5627 - DNA, 25 bp, Artificial
  primer
tattctctgtaacacccggcatatt

SEQ ID NO: 5628 - DNA, 25 bp, Artificial
  primer
acccggcatattagtgacagtgttt

SEQ ID NO: 5629 - DNA, 25 bp, Artificial
  primer
gacagtgttttcctagaagctgcaa

SEQ ID NO: 5630 - DNA, 25 bp, Artificial
  primer
agctgcaaaggccctgacaagccaa

SEQ ID NO: 5631 - DNA, 25 bp, Artificial
  primer
aggccctgacaagccaattgacaga

SEQ ID NO: 5632 - DNA, 25 bp, Artificial
  primer
aattgacagatgaagagctagccca

SEQ ID NO: 5633 - DNA, 25 bp, Artificial
  primer
gctagcccaagggagactttaccca

SEQ ID NO: 5634 - DNA, 25 bp, Artificial
  primer
tacccaccgcttgctaatattcagg

SEQ ID NO: 5635 - DNA, 25 bp, Artificial
  primer
ggaagtttctattaacattgctatt

SEQ ID NO: 5636 - DNA, 25 bp, Artificial
  primer
ccccaaacagaaccatcttcgacag

SEQ ID NO: 5637 - DNA, 25 bp, Artificial
  primer
atcttcgacagtgacctgatggata

SEQ ID NO: 5638 - DNA, 25 bp, Artificial
  primer
gatggatagtgccaggctgggcggc

SEQ ID NO: 5639 - DNA, 25 bp, Artificial
  primer
cggcgggcgcatggaggggccgccg

SEQ ID NO: 5640 - DNA, 25 bp, Artificial
  primer
cctagagagcgcagccatctggagc

SEQ ID NO: 5641 - DNA, 25 bp, Artificial
  primer
aacagaaaggacaccctctctaggg

SEQ ID NO: 5642 - DNA, 25 bp, Artificial
  primer
ggctggggctgcgtaggtgaaaagg

SEQ ID NO: 5643 - DNA, 25 bp, Artificial
  primer
tgaaaaggcagaacactccgcgctt

SEQ ID NO: 5644 - DNA, 25 bp, Artificial
  primer
gtgagaggaaggcggggggcgcagc

SEQ ID NO: 5645 - DNA, 25 bp, Artificial
  primer
aaaccacgtttctttgttgagctgt

SEQ ID NO: 5646 - DNA, 25 bp, Artificial
  primer
gttgagctgtgtcttgaaggcaaaa

SEQ ID NO: 5647 - DNA, 25 bp, Artificial
  primer
ccgacgtcgaccagcagggactggt

SEQ ID NO: 5648 - DNA, 25 bp, Artificial
  primer
gatagctgtaggactgggtgttgca

SEQ ID NO: 5649 - DNA, 25 bp, Artificial
  primer
ggtgttgcagctcttgcatttgcag

SEQ ID NO: 5650 - DNA, 25 bp, Artificial
  primer
gcatttgcaggtcgctacgcatttc

SEQ ID NO: 5651 - DNA, 25 bp, Artificial
  primer
acgcatttcggatctggaaacctct

SEQ ID NO: 5652 - DNA, 25 bp, Artificial
  primer
gaagatttcaactcctagcttttca

SEQ ID NO: 5653 - DNA, 25 bp, Artificial
  primer
tttaggtgtaagcccatctgctggc

SEQ ID NO: 5654 - DNA, 25 bp, Artificial
  primer
tggatctccttacgtagcagccaaa

SEQ ID NO: 5655 - DNA, 25 bp, Artificial
  primer
acatggtcttcttaattttctatat

SEQ ID NO: 5656 - DNA, 25 bp, Artificial
  primer
tggattgaccacagtcttatcttcc

SEQ ID NO: 5657 - DNA, 25 bp, Artificial
  primer
gtcttatcttccaccattaagctgt

SEQ ID NO: 5658 - DNA, 25 bp, Artificial
  primer
cgccctgcaattaacgttggtctgt

SEQ ID NO: 5659 - DNA, 25 bp, Artificial
  primer
tccgctgcccaaaccagggctatga

SEQ ID NO: 5660 - DNA, 25 bp, Artificial
  primer
gaagctggaattggctcagtatcgt

SEQ ID NO: 5661 - DNA, 25 bp, Artificial
  primer
gtatcgtgaggttgctgcttttgcc

SEQ ID NO: 5662 - DNA, 25 bp, Artificial
  primer
aacttttgagtcgtggcgtgcgtct

SEQ ID NO: 5663 - DNA, 25 bp, Artificial
  primer
ggcgtgcgtctaactgagttgctga

SEQ ID NO: 5664 - DNA, 25 bp, Artificial
  primer
cagtattctcccatggctattgaag

SEQ ID NO: 5665 - DNA, 25 bp, Artificial
  primer
aagtggctgttatctatgcgggtgt

SEQ ID NO: 5666 - DNA, 25 bp, Artificial
  primer
gcaccaagccttgttgggcactatc

SEQ ID NO: 5667 - DNA, 25 bp, Artificial
  primer
agcttaaactcctgtggattcacat

SEQ ID NO: 5668 - DNA, 25 bp, Artificial
  primer
gttcagttttgtcattgttctagta

SEQ ID NO: 5669 - DNA, 25 bp, Artificial
  primer
ctttctatattgttatcagtccagg

SEQ ID NO: 5670 - DNA, 25 bp, Artificial
  primer
gacattggctctttgtttaggccta

SEQ ID NO: 5671 - DNA, 25 bp, Artificial
  primer
gaatttgtgacttagttctgccctt

SEQ ID NO: 5672 - DNA, 25 bp, Artificial
  primer
gaaagcagtcttccatcaaatcacc

SEQ ID NO: 5673 - DNA, 25 bp, Artificial
  primer
aatgcacggctaaactattcagagt

SEQ ID NO: 5674 - DNA, 25 bp, Artificial
  primer
aagtactatgctttaatgcttcttt

SEQ ID NO: 5675 - DNA, 25 bp, Artificial
  primer
gcttctttcatcttactagtatggc

SEQ ID NO: 5676 - DNA, 25 bp, Artificial
  primer
tatgttattcctctgtgttcacttc

SEQ ID NO: 5677 - DNA, 25 bp, Artificial
  primer
acttcgccttgctcttgaaagtgca

SEQ ID NO: 5678 - DNA, 25 bp, Artificial
  primer
gtatatcctatacacacatctcctt

SEQ ID NO: 5679 - DNA, 25 bp, Artificial
  primer
tgagaagtctacattgcttacattt

SEQ ID NO: 5680 - DNA, 25 bp, Artificial
  primer
gaaatggtcctaatcctgagtcgtc

SEQ ID NO: 5681 - DNA, 25 bp, Artificial
  primer
tgagtcgtcacccttggattttatg

SEQ ID NO: 5682 - DNA, 25 bp, Artificial
  primer
atggatcacggagctgaccatcttt

SEQ ID NO: 5683 - DNA, 25 bp, Artificial
  primer
gaccatctttacctggtcctggaac

SEQ ID NO: 5684 - DNA, 25 bp, Artificial
  primer
gaaaatgagcctttggaccagtctt

SEQ ID NO: 5685 - DNA, 25 bp, Artificial
  primer
gagcctttggaccagtctttattaa

SEQ ID NO: 5686 - DNA, 25 bp, Artificial
  primer
tgagtagtctgcatatcgaatatct

SEQ ID NO: 5687 - DNA, 25 bp, Artificial
  primer
gaatatctagagctctaaacccccc

SEQ ID NO: 5688 - DNA, 25 bp, Artificial
  primer
gtcctgtggtttcattagtctgata

SEQ ID NO: 5689 - DNA, 25 bp, Artificial
  primer
agggatttcctcagtcacagatgat

SEQ ID NO: 5690 - DNA, 25 bp, Artificial
  primer
ggaaagctgcaataaagccacaatg

SEQ ID NO: 5691 - DNA, 25 bp, Artificial
  primer
gaacagaacctgagtcgtcggactt

SEQ ID NO: 5692 - DNA, 25 bp, Artificial
  primer
ggactttcaaaagcctcttcagagc

SEQ ID NO: 5693 - DNA, 25 bp, Artificial
  primer
gaggaaatccagttctatgtgcagc

SEQ ID NO: 5694 - DNA, 25 bp, Artificial
  primer
cagaggtcctctaaactggtaccga

SEQ ID NO: 5695 - DNA, 25 bp, Artificial
  primer
ggacggaagatcctgattccggccc

SEQ ID NO: 5696 - DNA, 25 bp, Artificial
  primer
gccctgatggtcacggcggagaagg

SEQ ID NO: 5697 - DNA, 25 bp, Artificial
  primer
cggagaaggacttcgtgctcgttcc

SEQ ID NO: 5698 - DNA, 25 bp, Artificial
  primer
gcacatggaggactggattccccac

SEQ ID NO: 5699 - DNA, 25 bp, Artificial
  primer
tggctggattctgatgcccggaacc

SEQ ID NO: 5700 - DNA, 25 bp, Artificial
  primer
ggaacccaccggtggtctcaaagat

SEQ ID NO: 5701 - DNA, 25 bp, Artificial
  primer
gtagaacgcagcgtgtgcccacgct

SEQ ID NO: 5702 - DNA, 25 bp, Artificial
  primer
gaacttacttcagattgtgcgggac

SEQ ID NO: 5703 - DNA, 25 bp, Artificial
  primer
cagattgtgcgggaccactgggttc

SEQ ID NO: 5704 - DNA, 25 bp, Artificial
  primer
ggaccactgggttcatgttcttgtc

SEQ ID NO: 5705 - DNA, 25 bp, Artificial
  primer
ctgggttcatgttcttgtccctatg

SEQ ID NO: 5706 - DNA, 25 bp, Artificial
  primer
tgtccctatgggatttgtcattgga

SEQ ID NO: 5707 - DNA, 25 bp, Artificial
  primer
gtgatgaacggctaactgccttccg

SEQ ID NO: 5708 - DNA, 25 bp, Artificial
  primer
gctaactgccttccggaacaagagt

SEQ ID NO: 5709 - DNA, 25 bp, Artificial
  primer
actgccttccggaacaagagtatgt

SEQ ID NO: 5710 - DNA, 25 bp, Artificial
  primer
aaagggaattgcaacccagtgaaga

SEQ ID NO: 5711 - DNA, 25 bp, Artificial
  primer
gactggctagattatcgaatgttca

SEQ ID NO: 5712 - DNA, 25 bp, Artificial
  primer
gttcacattttaaagttctgagaga

SEQ ID NO: 5713 - DNA, 25 bp, Artificial
  primer
gagaaccaggctatggacgtctcca

SEQ ID NO: 5714 - DNA, 25 bp, Artificial
  primer
caggctatggacgtctccaatcagc

SEQ ID NO: 5715 - DNA, 25 bp, Artificial
  primer
ctatggacgtctccaatcagctggc

SEQ ID NO: 5716 - DNA, 25 bp, Artificial
  primer
ctccaatcagctggccagagtctgc

SEQ ID NO: 5717 - DNA, 25 bp, Artificial
  primer
tctgctacagccctgactttgagaa

SEQ ID NO: 5718 - DNA, 25 bp, Artificial
  primer
gctacagccctgactttgagaaact

SEQ ID NO: 5719 - DNA, 25 bp, Artificial
  primer
atacttggaggaacttcctacaatg

SEQ ID NO: 5720 - DNA, 25 bp, Artificial
  primer
gaggaacttcctacaatgatgcagc

SEQ ID NO: 5721 - DNA, 25 bp, Artificial
  primer
ggaacttcctacaatgatgcagcac

SEQ ID NO: 5722 - DNA, 25 bp, Artificial
  primer
acttcctacaatgatgcagcacttc

SEQ ID NO: 5723 - DNA, 25 bp, Artificial
  primer
gaagaggccatggtttgttggagac

SEQ ID NO: 5724 - DNA, 25 bp, Artificial
  primer
gagaggcaaacccctgtttgtgcgt

SEQ ID NO: 5725 - DNA, 25 bp, Artificial
  primer
ctgtttgtgcgtcatagaacccaga

SEQ ID NO: 5726 - DNA, 25 bp, Artificial
  primer
ggacccacagcatgatctagatcga

SEQ ID NO: 5727 - DNA, 25 bp, Artificial
  primer
gataggtgtttgcactcatcttggc

SEQ ID NO: 5728 - DNA, 25 bp, Artificial
  primer
tcatcttggctgtgtacccattgca

SEQ ID NO: 5729 - DNA, 25 bp, Artificial
  primer
ttttggtggttattactgcccttgc

SEQ ID NO: 5730 - DNA, 25 bp, Artificial
  primer
gggtcacactatgatgcatctggca

SEQ ID NO: 5731 - DNA, 25 bp, Artificial
  primer
caggatcagattgggtcctgctcct

SEQ ID NO: 5732 - DNA, 25 bp, Artificial
  primer
tgaagtccccacgtatgagttcacc

SEQ ID NO: 5733 - DNA, 25 bp, Artificial
  primer
ggactcaagtcataggcttctttca

SEQ ID NO: 5734 - DNA, 25 bp, Artificial
  primer
ggcttctttcagtctttatgtcacc

SEQ ID NO: 5735 - DNA, 25 bp, Artificial
  primer
gcagatgtacaactcaccataccac

SEQ ID NO: 5736 - DNA, 25 bp, Artificial
  primer
aattcctgcaggagcactttaaccc

SEQ ID NO: 5737 - DNA, 25 bp, Artificial
  primer
ccagagacggtacaacccaagctcc

SEQ ID NO: 5738 - DNA, 25 bp, Artificial
  primer
ttgcgcaggagctgtagctgccgca

SEQ ID NO: 5739 - DNA, 25 bp, Artificial
  primer
cacaaccccactggacgtttgcaaa

SEQ ID NO: 5740 - DNA, 25 bp, Artificial
  primer
ttgcaaaacactgctcaacacccag

SEQ ID NO: 5741 - DNA, 25 bp, Artificial
  primer
cacccaggagtccttggctttgaac

SEQ ID NO: 5742 - DNA, 25 bp, Artificial
  primer
gcatggctagtgccttcaggacggt

SEQ ID NO: 5743 - DNA, 25 bp, Artificial
  primer
caagtaggtggggtgaccgcctatt

SEQ ID NO: 5744 - DNA, 25 bp, Artificial
  primer
atttccgaggggtgcaggccagagt

SEQ ID NO: 5745 - DNA, 25 bp, Artificial
  primer
agccatcgcatggtctgtgtatgag

SEQ ID NO: 5746 - DNA, 25 bp, Artificial
  primer
gcctggactatcatatatctgtgca

SEQ ID NO: 5747 - DNA, 25 bp, Artificial
  primer
atctgtgcagaacatgatgcgtcga

SEQ ID NO: 5748 - DNA, 25 bp, Artificial
  primer
aagcacgtggtgcaaagcatctcca

SEQ ID NO: 5749 - DNA, 25 bp, Artificial
  primer
gacaattgccaagtgcattgcggac

SEQ ID NO: 5750 - DNA, 25 bp, Artificial
  primer
gcattgcggacctaaagctgctggc

SEQ ID NO: 5751 - DNA, 25 bp, Artificial
  primer
gaaggctcaagcacagccagttatg

SEQ ID NO: 5752 - DNA, 25 bp, Artificial
  primer
tgacaaagtctttctgtgttggtgt

SEQ ID NO: 5753 - DNA, 25 bp, Artificial
  primer
gaacgaaatctctatcggccagtca

SEQ ID NO: 5754 - DNA, 25 bp, Artificial
  primer
atcggccagtcagatgtttctcatc

SEQ ID NO: 5755 - DNA, 25 bp, Artificial
  primer
aaacttgctgcctgactaaagatta

SEQ ID NO: 5756 - DNA, 25 bp, Artificial
  primer
aattaattctaccatcttgcaataa

SEQ ID NO: 5757 - DNA, 25 bp, Artificial
  primer
ggaagtcctgatactgaatctccag

SEQ ID NO: 5758 - DNA, 25 bp, Artificial
  primer
gaatctccagtgttagtgaatgact

SEQ ID NO: 5759 - DNA, 25 bp, Artificial
  primer
gaagatttaccactgaaactgacaa

SEQ ID NO: 5760 - DNA, 25 bp, Artificial
  primer
gaacctgaaacggtgggagcccaga

SEQ ID NO: 5761 - DNA, 25 bp, Artificial
  primer
gggagcccagagtatatgagatgtc

SEQ ID NO: 5762 - DNA, 25 bp, Artificial
  primer
atgtcttcagaggctcatctaactc

SEQ ID NO: 5763 - DNA, 25 bp, Artificial
  primer
catctaactctgtccttacatactc

SEQ ID NO: 5764 - DNA, 25 bp, Artificial
  primer
gtttgacactgcttttttgataggt

SEQ ID NO: 5765 - DNA, 25 bp, Artificial
  primer
tgataggtgtggtcatttctcccca

SEQ ID NO: 5766 - DNA, 25 bp, Artificial
  primer
gatttaagccttgacacactgtgtt

SEQ ID NO: 5767 - DNA, 25 bp, Artificial
  primer
atttttttccccattgtgatgtttg

SEQ ID NO: 5768 - DNA, 25 bp, Artificial
  primer
ggagctgctgggacaggggattgat

SEQ ID NO: 5769 - DNA, 25 bp, Artificial
  primer
agctcacggctgacgccaagtttga

SEQ ID NO: 5770 - DNA, 25 bp, Artificial
  primer
tccagtgcggccaagcacagtgtcg

SEQ ID NO: 5771 - DNA, 25 bp, Artificial
  primer
agtgtcgatggcgaatccttgtcca

SEQ ID NO: 5772 - DNA, 25 bp, Artificial
  primer
tccttgtccagtgaactgcagcagc

SEQ ID NO: 5773 - DNA, 25 bp, Artificial
  primer
agctggggctgcccaaagagcacgc

SEQ ID NO: 5774 - DNA, 25 bp, Artificial
  primer
ccagcctgtgccgctgttatgagga

SEQ ID NO: 5775 - DNA, 25 bp, Artificial
  primer
caaagccccttgcagaagcacttgc

SEQ ID NO: 5776 - DNA, 25 bp, Artificial
  primer
tgaactgctcttcgggaggcagccc

SEQ ID NO: 5777 - DNA, 25 bp, Artificial
  primer
gccctggttctaggatgctgaggcc

SEQ ID NO: 5778 - DNA, 25 bp, Artificial
  primer
gcctcacttctctcttgagaacttg

SEQ ID NO: 5779 - DNA, 25 bp, Artificial
  primer
ggcatggagcacttgggtttagagg

SEQ ID NO: 5780 - DNA, 25 bp, Artificial
  primer
aaaacatcatagcttcattgttcca

SEQ ID NO: 5781 - DNA, 25 bp, Artificial
  primer
gcttcattgttccagatgtaacagg

SEQ ID NO: 5782 - DNA, 25 bp, Artificial
  primer
cattccaggggagttttcttttgag

SEQ ID NO: 5783 - DNA, 25 bp, Artificial
  primer
tttgcatgttcctgttctttgtgga

SEQ ID NO: 5784 - DNA, 25 bp, Artificial
  primer
tcctgttctttgtggaaactatgca

SEQ ID NO: 5785 - DNA, 25 bp, Artificial
  primer
ttttgcttgctgtgttttccatact

SEQ ID NO: 5786 - DNA, 25 bp, Artificial
  primer
atgtaggacaaaacttttctgtgaa

SEQ ID NO: 5787 - DNA, 25 bp, Artificial
  primer
cgtatttggtatgcctatataggtc

SEQ ID NO: 5788 - DNA, 25 bp, Artificial
  primer
aatgggtttgtatgctgtttaatgt

SEQ ID NO: 5789 - DNA, 25 bp, Artificial
  primer
gtatgctgtttaatgtgcactgaac

SEQ ID NO: 5790 - DNA, 25 bp, Artificial
  primer
ggccaaatcaccgacctgaaggcgg

SEQ ID NO: 5791 - DNA, 25 bp, Artificial
  primer
ttcacgggggcagtctcattaatct

SEQ ID NO: 5792 - DNA, 25 bp, Artificial
  primer
gacttggacagctcctggggatgat

SEQ ID NO: 5793 - DNA, 25 bp, Artificial
  primer
caagtgaatactactgctctcatcc

SEQ ID NO: 5794 - DNA, 25 bp, Artificial
  primer
ggcacagatcttttcattgctattc

SEQ ID NO: 5795 - DNA, 25 bp, Artificial
  primer
atctttgtttattcctccacagact

SEQ ID NO: 5796 - DNA, 25 bp, Artificial
  primer
cgccagagacacctagtcctgatga

SEQ ID NO: 5797 - DNA, 25 bp, Artificial
  primer
tagtcctgatgaaacgtctgctcct

SEQ ID NO: 5798 - DNA, 25 bp, Artificial
  primer
tctgctccttgtcctaatattcata

SEQ ID NO: 5799 - DNA, 25 bp, Artificial
  primer
tatcaacagcaccattcctggcatt

SEQ ID NO: 5800 - DNA, 25 bp, Artificial
  primer
actgcagctgtcaatagcctagggc

SEQ ID NO: 5801 - DNA, 25 bp, Artificial
  primer
ggctcaggagccagtatcaagctct

SEQ ID NO: 5802 - DNA, 25 bp, Artificial
  primer
aagctctcagtcaagatccaaacag

SEQ ID NO: 5803 - DNA, 25 bp, Artificial
  primer
gatccaaacagtctttcaaacctag

SEQ ID NO: 5804 - DNA, 25 bp, Artificial
  primer
agatcaggatctccccaataatatg

SEQ ID NO: 5805 - DNA, 25 bp, Artificial
  primer
taccaagtcgccattaagtctcttc

SEQ ID NO: 5806 - DNA, 25 bp, Artificial
  primer
tcttcctcaagactggctgtggtgt

SEQ ID NO: 5807 - DNA, 25 bp, Artificial
  primer
gaatccaaactaaaagctgctgcca

SEQ ID NO: 5808 - DNA, 25 bp, Artificial
  primer
ctgccagaattgtcccagaatgggt

SEQ ID NO: 5809 - DNA, 25 bp, Artificial
  primer
gacacatgatgaactctagcactgg

SEQ ID NO: 5810 - DNA, 25 bp, Artificial
  primer
tgctggggaagtctggagcccctgc

SEQ ID NO: 5811 - DNA, 25 bp, Artificial
  primer
agcccctgctgagacgatttggaag

SEQ ID NO: 5812 - DNA, 25 bp, Artificial
  primer
ggggcccaaggaattcgcaagatgg

SEQ ID NO: 5813 - DNA, 25 bp, Artificial
  primer
aggaattcgcaagatggcgccgtcc

SEQ ID NO: 5814 - DNA, 25 bp, Artificial
  primer
gcccttcagtgcgatcaaagttcta

SEQ ID NO: 5815 - DNA, 25 bp, Artificial
  primer
gtgcgatcaaagttctacgtgcgag

SEQ ID NO: 5816 - DNA, 25 bp, Artificial
  primer
ttctacgtgcgagagccgccgaatg

SEQ ID NO: 5817 - DNA, 25 bp, Artificial
  primer
ccgccgaatgccaaacctgactggc

SEQ ID NO: 5818 - DNA, 25 bp, Artificial
  primer
acctgactggctgaaagttgggttc

SEQ ID NO: 5819 - DNA, 25 bp, Artificial
  primer
tgaaagttgggttcaccttgggcac

SEQ ID NO: 5820 - DNA, 25 bp, Artificial
  primer
gtcttcttgtggatctatctcatca

SEQ ID NO: 5821 - DNA, 25 bp, Artificial
  primer
ggatctatctcatcaaacaacacaa

SEQ ID NO: 5822 - DNA, 25 bp, Artificial
  primer
caagccagcatttgtattttgcatc

SEQ ID NO: 5823 - DNA, 25 bp, Artificial
  primer
gggggttgaagtgtttatctgattt

SEQ ID NO: 5824 - DNA, 25 bp, Artificial
  primer
agtgctaagttatctagttggctac

SEQ ID NO: 5825 - DNA, 25 bp, Artificial
  primer
tagttggctactattacaccttaaa

SEQ ID NO: 5826 - DNA, 25 bp, Artificial
  primer
acaattacctgtttatatggtgctc

SEQ ID NO: 5827 - DNA, 25 bp, Artificial
  primer
tatggtgctcatttgttattctcaa

SEQ ID NO: 5828 - DNA, 25 bp, Artificial
  primer
gagaaagattctaccaaccactgtt

SEQ ID NO: 5829 - DNA, 25 bp, Artificial
  primer
taccaaccactgtttcactactttt

SEQ ID NO: 5830 - DNA, 25 bp, Artificial
  primer
gtagaaggcccaaatcacagaataa

SEQ ID NO: 5831 - DNA, 25 bp, Artificial
  primer
ggatttgctgacattccatactaat

SEQ ID NO: 5832 - DNA, 25 bp, Artificial
  primer
gaatctcagaagtagtttgctgcta

SEQ ID NO: 5833 - DNA, 25 bp, Artificial
  primer
aacccttgttgacttttctacactg

SEQ ID NO: 5834 - DNA, 25 bp, Artificial
  primer
ggtaggtggtgattttgaggctgta

SEQ ID NO: 5835 - DNA, 25 bp, Artificial
  primer
tgaggctgtaacatgcccagaagct

SEQ ID NO: 5836 - DNA, 25 bp, Artificial
  primer
gaagctgttgtggccgacacttcaa

SEQ ID NO: 5837 - DNA, 25 bp, Artificial
  primer
gtggccgacacttcaacaataggga

SEQ ID NO: 5838 - DNA, 25 bp, Artificial
  primer
atatccctactgacagtaactacct

SEQ ID NO: 5839 - DNA, 25 bp, Artificial
  primer
gtaactacctgtcacatatttctct

SEQ ID NO: 5840 - DNA, 25 bp, Artificial
  primer
cttttgggtggtggggcttgatgta

SEQ ID NO: 5841 - DNA, 25 bp, Artificial
  primer
ggcatggtttgcggaggttagattt

SEQ ID NO: 5842 - DNA, 25 bp, Artificial
  primer
gtgaattgtgctctgatggttaaaa

SEQ ID NO: 5843 - DNA, 25 bp, Artificial
  primer
agattgtcaagcattccgtattaac

SEQ ID NO: 5844 - DNA, 25 bp, Artificial
  primer
attgattcccatctggcatattcta

SEQ ID NO: 5845 - DNA, 25 bp, Artificial
  primer
ggtagttgcagaacagcccttacat

SEQ ID NO: 5846 - DNA, 25 bp, Artificial
  primer
aggtctactagatgtgcttccaaaa

SEQ ID NO: 5847 - DNA, 25 bp, Artificial
  primer
aaatgctgatcagttttacctcttt

SEQ ID NO: 5848 - DNA, 25 bp, Artificial
  primer
gcagttcaagcgttggttctggtca

SEQ ID NO: 5849 - DNA, 25 bp, Artificial
  primer
ttttggacatcaagcccatcactgc

SEQ ID NO: 5850 - DNA, 25 bp, Artificial
  primer
gaagaaggattccagcctatgccct

SEQ ID NO: 5851 - DNA, 25 bp, Artificial
  primer
gcctatgccctcaatcacaataaga

SEQ ID NO: 5852 - DNA, 25 bp, Artificial
  primer
ccaacatcttcctactgcaaatact

SEQ ID NO: 5853 - DNA, 25 bp, Artificial
  primer
atacttgcatttctcgactttacgt

SEQ ID NO: 5854 - DNA, 25 bp, Artificial
  primer
tcccactctattcctctaaacagat

SEQ ID NO: 5855 - DNA, 25 bp, Artificial
  primer
aattgttactcgccattaagaccaa

SEQ ID NO: 5856 - DNA, 25 bp, Artificial
  primer
gtacataacttctatcacttgccac

SEQ ID NO: 5857 - DNA, 25 bp, Artificial
  primer
aaatcagggcctgtgttcatacaca

SEQ ID NO: 5858 - DNA, 25 bp, Artificial
  primer
ggcctgagatttctgcactttaaac

SEQ ID NO: 5859 - DNA, 25 bp, Artificial
  primer
gtaaggtctacagcattgttcctca

SEQ ID NO: 5860 - DNA, 25 bp, Artificial
  primer
attgttcctcaaacttggctacgta

SEQ ID NO: 5861 - DNA, 25 bp, Artificial
  primer
ttggctacgtattggaatcacctaa

SEQ ID NO: 5862 - DNA, 25 bp, Artificial
  primer
caaaacatggatgtctgggtcccgc

SEQ ID NO: 5863 - DNA, 25 bp, Artificial
  primer
gtcccgccccatagagaatgactta

SEQ ID NO: 5864 - DNA, 25 bp, Artificial
  primer
aattggcatggggtgcagtccaggc

SEQ ID NO: 5865 - DNA, 25 bp, Artificial
  primer
gtttgcatttgggactcctcatcat

SEQ ID NO: 5866 - DNA, 25 bp, Artificial
  primer
ggactcctcatcatatacttggtat

SEQ ID NO: 5867 - DNA, 25 bp, Artificial
  primer
gtatcaaaatcttccaattatcatg

SEQ ID NO: 5868 - DNA, 25 bp, Artificial
  primer
atcttccaattatcatgctcacctg

SEQ ID NO: 5869 - DNA, 25 bp, Artificial
  primer
tccaattatcatgctcacctgaaag

SEQ ID NO: 5870 - DNA, 25 bp, Artificial
  primer
gctcacctgaaagaggtatgctctc

SEQ ID NO: 5871 - DNA, 25 bp, Artificial
  primer
gaggtatgctctcttaggaatacag

SEQ ID NO: 5872 - DNA, 25 bp, Artificial
  primer
taggaatacagtttctagcattaaa

SEQ ID NO: 5873 - DNA, 25 bp, Artificial
  primer
taataaaatgttcctcgcattcccc

SEQ ID NO: 5874 - DNA, 25 bp, Artificial
  primer
agtttcactgtgtagagaacatata

SEQ ID NO: 5875 - DNA, 25 bp, Artificial
  primer
ataggtcaattatatgtctccatta

SEQ ID NO: 5876 - DNA, 25 bp, Artificial
  primer
aaacatgttctagaactagttacaa

SEQ ID NO: 5877 - DNA, 25 bp, Artificial
  primer
aaatatatttggacataacagactt

SEQ ID NO: 5878 - DNA, 25 bp, Artificial
  primer
gtctgtctatcaatattgttcttca

SEQ ID NO: 5879 - DNA, 25 bp, Artificial
  primer
tttcctgatctgtcatcttcatagc

SEQ ID NO: 5880 - DNA, 25 bp, Artificial
  primer
aatgctcttgagctcacaacatttg

SEQ ID NO: 5881 - DNA, 25 bp, Artificial
  primer
accaaagctcactactgcggtttgc

SEQ ID NO: 5882 - DNA, 25 bp, Artificial
  primer
gtttgcctgtgcctggacaatgagg

SEQ ID NO: 5883 - DNA, 25 bp, Artificial
  primer
ggacaatgaggcggagccactgttg

SEQ ID NO: 5884 - DNA, 25 bp, Artificial
  primer
tccccgggtttgcaaatagaggcta

SEQ ID NO: 5885 - DNA, 25 bp, Artificial
  primer
tagaggctaccgggtgctgtattca

SEQ ID NO: 5886 - DNA, 25 bp, Artificial
  primer
gttattaaactatcatctccacctt

SEQ ID NO: 5887 - DNA, 25 bp, Artificial
  primer
ctccaccttccttttgattagcaat

SEQ ID NO: 5888 - DNA, 25 bp, Artificial
  primer
ggtggtgtataattctacttttcta

SEQ ID NO: 5889 - DNA, 25 bp, Artificial
  primer
gttacggcattgccttttctttctg

SEQ ID NO: 5890 - DNA, 25 bp, Artificial
  primer
ttctgtggatccagtatcttcctcg

SEQ ID NO: 5891 - DNA, 25 bp, Artificial
  primer
atcttcctcggctttttagggagca

SEQ ID NO: 5892 - DNA, 25 bp, Artificial
  primer
aaacctgccctgttgtatataactg

SEQ ID NO: 5893 - DNA, 25 bp, Artificial
  primer
aactgtgtctgtttcaccgtgtgac

SEQ ID NO: 5894 - DNA, 25 bp, Artificial
  primer
gccacgatttgcccgagggttactc

SEQ ID NO: 5895 - DNA, 25 bp, Artificial
  primer
cctttgctctcaccttgtatggatg

SEQ ID NO: 5896 - DNA, 25 bp, Artificial
  primer
gatgaagccatttcttatcctgtag

SEQ ID NO: 5897 - DNA, 25 bp, Artificial
  primer
gtagcatcagaagctcgttccttca

SEQ ID NO: 5898 - DNA, 25 bp, Artificial
  primer
cacactcagtggcgtctgtgcttgt

SEQ ID NO: 5899 - DNA, 25 bp, Artificial
  primer
cacccagggcgcctgttgacaagtg

SEQ ID NO: 5900 - DNA, 25 bp, Artificial
  primer
gttatgccttctggctactacagaa

SEQ ID NO: 5901 - DNA, 25 bp, Artificial
  primer
acagaatctccgcagaccttttagt

SEQ ID NO: 5902 - DNA, 25 bp, Artificial
  primer
gaaggtgtccttatggtcttaggaa

SEQ ID NO: 5903 - DNA, 25 bp, Artificial
  primer
atagctattttcatttgctctattt

SEQ ID NO: 5904 - DNA, 25 bp, Artificial
  primer
tgctctattttcctctgcattgtac

SEQ ID NO: 5905 - DNA, 25 bp, Artificial
  primer
gcattgtactaatctgttactcagt

SEQ ID NO: 5906 - DNA, 25 bp, Artificial
  primer
gttactcagtgttagtcttcatttt

SEQ ID NO: 5907 - DNA, 25 bp, Artificial
  primer
gtgttggaaacctgcgtcatgtaaa

SEQ ID NO: 5908 - DNA, 25 bp, Artificial
  primer
aatcttccacttaaccactgaaaat

SEQ ID NO: 5909 - DNA, 25 bp, Artificial
  primer
agctcctattaatttgcttatcccc

SEQ ID NO: 5910 - DNA, 25 bp, Artificial
  primer
tatccccctcatgtagctagttgaa

SEQ ID NO: 5911 - DNA, 25 bp, Artificial
  primer
gttgtgcctcttgtgtgctagatta

SEQ ID NO: 5912 - DNA, 25 bp, Artificial
  primer
acttgacttgatcctctgagctcaa

SEQ ID NO: 5913 - DNA, 25 bp, Artificial
  primer
ggcagaggactgagggtacctgcac

SEQ ID NO: 5914 - DNA, 25 bp, Artificial
  primer
tgcacagtttgattcttttccacgt

SEQ ID NO: 5915 - DNA, 25 bp, Artificial
  primer
ttttccacgtgtaagtctccattgc

SEQ ID NO: 5916 - DNA, 25 bp, Artificial
  primer
gtctccattgcagaattgtcgtgct

SEQ ID NO: 5917 - DNA, 25 bp, Artificial
  primer
gtgtgggagttgaacgaccctgctg

SEQ ID NO: 5918 - DNA, 25 bp, Artificial
  primer
gaccctgtcggggcagtcaggggac

SEQ ID NO: 5919 - DNA, 25 bp, Artificial
  primer
gagatttgatctcatgcgagtcatc

SEQ ID NO: 5920 - DNA, 25 bp, Artificial
  primer
cctgccctggctggcatgtgagaag

SEQ ID NO: 5921 - DNA, 25 bp, Artificial
  primer
gctgagtgttggttcctttttctta

SEQ ID NO: 5922 - DNA, 25 bp, Artificial
  primer
taccaacgtcaaaggcatctatgca

SEQ ID NO: 5923 - DNA, 25 bp, Artificial
  primer
gcaatagctgctggccgaaaacttg

SEQ ID NO: 5924 - DNA, 25 bp, Artificial
  primer
aacttgcccatcgactttttgaata

SEQ ID NO: 5925 - DNA, 25 bp, Artificial
  primer
caacatcccaactgtggtcttcagc

SEQ ID NO: 5926 - DNA, 25 bp, Artificial
  primer
tattcaacgagctttaccccgatgt

SEQ ID NO: 5927 - DNA, 25 bp, Artificial
  primer
ttaccccgatgtatcacgcagttac

SEQ ID NO: 5928 - DNA, 25 bp, Artificial
  primer
aaatgctgcagggttttgctgttgc

SEQ ID NO: 5929 - DNA, 25 bp, Artificial
  primer
tttgacaacacagtcgccattcacc

SEQ ID NO: 5930 - DNA, 25 bp, Artificial
  primer
ttcaccctacctcttcagaagagct

SEQ ID NO: 5931 - DNA, 25 bp, Artificial
  primer
aagagctggtcacacttcgttgaga

SEQ ID NO: 5932 - DNA, 25 bp, Artificial
  primer
gaaccaggagacacgtgtggcgggc

SEQ ID NO: 5933 - DNA, 25 bp, Artificial
  primer
tagccaaacggctgtgctcagatgg

SEQ ID NO: 5934 - DNA, 25 bp, Artificial
  primer
tgagctgaggttggtctcttgccaa

SEQ ID NO: 5935 - DNA, 25 bp, Artificial
  primer
gttgttcttcatgtcttcgagttca

SEQ ID NO: 5936 - DNA, 25 bp, Artificial
  primer
tttttttcattctgcctattctggc

SEQ ID NO: 5937 - DNA, 25 bp, Artificial
  primer
atcagctcacttgaggagtccctca

SEQ ID NO: 5938 - DNA, 25 bp, Artificial
  primer
ggcatcgtcttagactttgtggctc

SEQ ID NO: 5939 - DNA, 25 bp, Artificial
  primer
tgtggctctaaagtacctgtctgtt

SEQ ID NO: 5940 - DNA, 25 bp, Artificial
  primer
atttcaagtctcttgtcaccatcct

SEQ ID NO: 5941 - DNA, 25 bp, Artificial
  primer
aagactttgcaaactgatctctccc

SEQ ID NO: 5942 - DNA, 25 bp, Artificial
  primer
gatctctcccccgtgaaggagttga

SEQ ID NO: 5943 - DNA, 25 bp, Artificial
  primer
aaccttgcgtcacggagctgttagt

SEQ ID NO: 5944 - DNA, 25 bp, Artificial
  primer
tattgcctaacttaagccatgactt

SEQ ID NO: 5945 - DNA, 25 bp, Artificial
  primer
aatatcggcgtgtggctggagcctt

SEQ ID NO: 5946 - DNA, 25 bp, Artificial
  primer
agttgggaactctttgtgcttgtga

SEQ ID NO: 5947 - DNA, 25 bp, Artificial
  primer
gtgcttgtgatctactggacttttt

SEQ ID NO: 5948 - DNA, 25 bp, Artificial
  primer
caggaagtgcattctctggtccttc

SEQ ID NO: 5949 - DNA, 25 bp, Artificial
  primer
tccctattttctgttctggatgtca

SEQ ID NO: 5950 - DNA, 25 bp, Artificial
  primer
agtgcactgctactgttttatccac

SEQ ID NO: 5951 - DNA, 25 bp, Artificial
  primer
gttttatccacttggccacagactt

SEQ ID NO: 5952 - DNA, 25 bp, Artificial
  primer
agactttttctaacagctgcgtatt

SEQ ID NO: 5953 - DNA, 25 bp, Artificial
  primer
gcattggcagcattgtgtctttgac

SEQ ID NO: 5954 - DNA, 25 bp, Artificial
  primer
gtgtctttgaccttgtatactagct

SEQ ID NO: 5955 - DNA, 25 bp, Artificial
  primer
tattggagacacagcggttcgagaa

SEQ ID NO: 5956 - DNA, 25 bp, Artificial
  primer
gagacacagcggttcgagaagtttt

SEQ ID NO: 5957 - DNA, 25 bp, Artificial
  primer
acagcggttcgagaagtttttgaag

SEQ ID NO: 5958 - DNA, 25 bp, Artificial
  primer
atcagaattcaggtccgtcctgagt

SEQ ID NO: 5959 - DNA, 25 bp, Artificial
  primer
aggtccgtcctgagtattcggcaac

SEQ ID NO: 5960 - DNA, 25 bp, Artificial
  primer
tccgtcctgagtattcggcaacagc

SEQ ID NO: 5961 - DNA, 25 bp, Artificial
  primer
gtcctgagtattcggcaacagcaca

SEQ ID NO: 5962 - DNA, 25 bp, Artificial
  primer
gtattcggcaacagcacacaaatcc

SEQ ID NO: 5963 - DNA, 25 bp, Artificial
  primer
tcggcaacagcacacaaatcctgga

SEQ ID NO: 5964 - DNA, 25 bp, Artificial
  primer
acagcacacaaatcctggagctttt

SEQ ID NO: 5965 - DNA, 25 bp, Artificial
  primer
acacaaatcctggagcttttgggaa

SEQ ID NO: 5966 - DNA, 25 bp, Artificial
  primer
tcaagtgggaagagcgctgttcaag

SEQ ID NO: 5967 - DNA, 25 bp, Artificial
  primer
gtgggaagagcgctgttcaaggacc

SEQ ID NO: 5968 - DNA, 25 bp, Artificial
  primer
atccggaaacacattccggcccgag

SEQ ID NO: 5969 - DNA, 25 bp, Artificial
  primer
ccctgaacgagctggtgacgctgac

SEQ ID NO: 5970 - DNA, 25 bp, Artificial
  primer
gaacgagctggtgacgctgacgtgc

SEQ ID NO: 5971 - DNA, 25 bp, Artificial
  primer
ccccgcgagaagtacctgacttggg

SEQ ID NO: 5972 - DNA, 25 bp, Artificial
  primer
gagaagtacctgacttgggcatccc

SEQ ID NO: 5973 - DNA, 25 bp, Artificial
  primer
caccttcgctgtgaccagcatactg

SEQ ID NO: 5974 - DNA, 25 bp, Artificial
  primer
tcgctgtgaccagcatactgcgcgt

SEQ ID NO: 5975 - DNA, 25 bp, Artificial
  primer
tgaccagcatactgcgcgtggcagc

SEQ ID NO: 5976 - DNA, 25 bp, Artificial
  primer
tcaatgtgtctgttgtcatggcgga

SEQ ID NO: 5977 - DNA, 25 bp, Artificial
  primer
tcacttgtggttctacattcctggt

SEQ ID NO: 5978 - DNA, 25 bp, Artificial
  primer
tgaatgttgctgtcaaagggctgcc

SEQ ID NO: 5979 - DNA, 25 bp, Artificial
  primer
tgccccctaccttataagggttgct

SEQ ID NO: 5980 - DNA, 25 bp, Artificial
  primer
atataaatgttgtccacttcccttt

SEQ ID NO: 5981 - DNA, 25 bp, Artificial
  primer
ccttttccacaggcctagaacagtt

SEQ ID NO: 5982 - DNA, 25 bp, Artificial
  primer
cataatttgtttaggctcccacata

SEQ ID NO: 5983 - DNA, 25 bp, Artificial
  primer
ggccaacaactttggttcatccttt

SEQ ID NO: 5984 - DNA, 25 bp, Artificial
  primer
gaggatttggctaccctgagtatat

SEQ ID NO: 5985 - DNA, 25 bp, Artificial
  primer
ttatattcatttcttctgttctcct

SEQ ID NO: 5986 - DNA, 25 bp, Artificial
  primer
agggcccaaatgcataagtttcttt

SEQ ID NO: 5987 - DNA, 25 bp, Artificial
  primer
aagtttctttgcactgttgcactta

SEQ ID NO: 5988 - DNA, 25 bp, Artificial
  primer
tgatttgtcctgcagtgctcattca

SEQ ID NO: 5989 - DNA, 25 bp, Artificial
  primer
aacagcaggccatctttttatgcaa

SEQ ID NO: 5990 - DNA, 25 bp, Artificial
  primer
acttcactggtgtacatcgtttact

SEQ ID NO: 5991 - DNA, 25 bp, Artificial
  primer
tcgtttactttttaactggcttcat

SEQ ID NO: 5992 - DNA, 25 bp, Artificial
  primer
agaaatgcggaccaaactacttcat

SEQ ID NO: 5993 - DNA, 25 bp, Artificial
  primer
actacttcattttctcaaagggcat

SEQ ID NO: 5994 - DNA, 25 bp, Artificial
  primer
gcataccttgtgcattgtggcttat

SEQ ID NO: 5995 - DNA, 25 bp, Artificial
  primer
gatgagccatattaattgcctgtta

SEQ ID NO: 5996 - DNA, 25 bp, Artificial
  primer
gttattattaccagcatttgtcctt

SEQ ID NO: 5997 - DNA, 25 bp, Artificial
  primer
atacttgcactctttaacacattct

SEQ ID NO: 5998 - DNA, 25 bp, Artificial
  primer
agaggagtgttattgcatgctgata

SEQ ID NO: 5999 - DNA, 25 bp, Artificial
  primer
tgggtcatttacatgtacactacat

SEQ ID NO: 6000 - DNA, 25 bp, Artificial
  primer
gatactcatgttgcatgttctttta

SEQ ID NO: 6001 - DNA, 25 bp, Artificial
  primer
tagtgattttgtgtcttaagtcttt

SEQ ID NO: 6002 - DNA, 25 bp, Artificial
  primer
taagtctttaacttccaatacttca

SEQ ID NO: 6003 - DNA, 25 bp, Artificial
  primer
gtatgtaaccttccatgtttgcttc

SEQ ID NO: 6004 - DNA, 25 bp, Artificial
  primer
ggaaatgtaggttcactgccacttc

SEQ ID NO: 6005 - DNA, 25 bp, Artificial
  primer
ggttcactgccacttcatgagatat

SEQ ID NO: 6006 - DNA, 25 bp, Artificial
  primer
catgagatatctctgctcacgcttc

SEQ ID NO: 6007 - DNA, 25 bp, Artificial
  primer
caaagttgggtttgccattcatccc

SEQ ID NO: 6008 - DNA, 25 bp, Artificial
  primer
atggtaaatcttgtgttgttccctg

SEQ ID NO: 6009 - DNA, 25 bp, Artificial
  primer
tgtcctccgtattacgtgaccggca

SEQ ID NO: 6010 - DNA, 25 bp, Artificial
  primer
ttcctgcttaagttgtgcctttcag

SEQ ID NO: 6011 - DNA, 25 bp, Artificial
  primer
aagttgtgcctttcagcttcaatga

SEQ ID NO: 6012 - DNA, 25 bp, Artificial
  primer
gaatagctgtggtttctccagtaaa

SEQ ID NO: 6013 - DNA, 25 bp, Artificial
  primer
tcttctactgaacatggagccatta

SEQ ID NO: 6014 - DNA, 25 bp, Artificial
  primer
aaatcaggttggtctctgctgggtc

SEQ ID NO: 6015 - DNA, 25 bp, Artificial
  primer
gacaagtgtagttgtcgtccaccac

SEQ ID NO: 6016 - DNA, 25 bp, Artificial
  primer
tcgtccaccacctttcaaaaaatgt

SEQ ID NO: 6017 - DNA, 25 bp, Artificial
  primer
cctttttgctgacaacactgtgtac

SEQ ID NO: 6018 - DNA, 25 bp, Artificial
  primer
acactgtgtacattgaccacttcct

SEQ ID NO: 6019 - DNA, 25 bp, Artificial
  primer
accacttcctaccatactttatgtt

SEQ ID NO: 6020 - DNA, 25 bp, Artificial
  primer
ggtacattatctcatgcttctgcaa

SEQ ID NO: 6021 - DNA, 25 bp, Artificial
  primer
ttggaccccaaggatttgcgaatag

SEQ ID NO: 6022 - DNA, 25 bp, Artificial
  primer
gatacatttcgagccaaaggagcag

SEQ ID NO: 6023 - DNA, 25 bp, Artificial
  primer
tgatagtgccgtcagacttgtccac

SEQ ID NO: 6024 - DNA, 25 bp, Artificial
  primer
ccacatccccacagggctagtagta

SEQ ID NO: 6025 - DNA, 25 bp, Artificial
  primer
gcctttcgtgtgttgagagctagac

SEQ ID NO: 6026 - DNA, 25 bp, Artificial
  primer
gagctagactctaccagcagattat

SEQ ID NO: 6027 - DNA, 25 bp, Artificial
  primer
agagcccagtcagagcgaattcgga

SEQ ID NO: 6028 - DNA, 25 bp, Artificial
  primer
tcggacatataatttcacccaggat

SEQ ID NO: 6029 - DNA, 25 bp, Artificial
  primer
gtcagtgaccacaggatagcatatg

SEQ ID NO: 6030 - DNA, 25 bp, Artificial
  primer
gggaagggcctggatcagctaattc

SEQ ID NO: 6031 - DNA, 25 bp, Artificial
  primer
gctgaacttttggatgaacacctta

SEQ ID NO: 6032 - DNA, 25 bp, Artificial
  primer
tttttcctctgggacctacagtgat

SEQ ID NO: 6033 - DNA, 25 bp, Artificial
  primer
ctcctccactataatcctctttagg

SEQ ID NO: 6034 - DNA, 25 bp, Artificial
  primer
aacccagtgaatctcattactccta

SEQ ID NO: 6035 - DNA, 25 bp, Artificial
  primer
gccttttcaggcacatggtttcaac

SEQ ID NO: 6036 - DNA, 25 bp, Artificial
  primer
gacattccttgtcctgaggagcact

SEQ ID NO: 6037 - DNA, 25 bp, Artificial
  primer
ttccaggcatagttacagcttcccc

SEQ ID NO: 6038 - DNA, 25 bp, Artificial
  primer
gcttccccactgtatttacaagcca

SEQ ID NO: 6039 - DNA, 25 bp, Artificial
  primer
tgtgcaactcttctggatcattaat

SEQ ID NO: 6040 - DNA, 25 bp, Artificial
  primer
aaatggcttcagtatggcttgtttt

SEQ ID NO: 6041 - DNA, 25 bp, Artificial
  primer
tccagatggctttttctcttatttt

SEQ ID NO: 6042 - DNA, 25 bp, Artificial
  primer
gaagccccagtctttgattttacag

SEQ ID NO: 6043 - DNA, 49 bp, Artificial
  primer
cgctgccaactaccgcacatcttattttttattgtggtttggttgagtc

SEQ ID NO: 6044 - DNA, 49 bp, Artificial
  primer
cgctgccaactaccgcacatcacctccaacataaaattcttcatcctac

SEQ ID NO: 6045 - DNA, 51 bp, Artificial
  primer
cgctgccaactaccgcacatcataatcgtgttgtttatatgatgttcgata

SEQ ID NO: 6046 - DNA, 51 bp, Artificial
  primer
cgctgccaactaccgcacatccacaacaaactataaaaaataaaacccaac

SEQ ID NO: 6047 - DNA, 21 bp, Artificial
  primer
cgctgccaactaccgcacatc

SEQ ID NO: 6048 - DNA, 34 bp, Artificial
  primer
tgttattttttattgtggtttggttgagttggtt

SEQ ID NO: 6049 - DNA, 37 bp, Artificial
  primer
ttgtttttttttttttttagtggttgtattttgtgtt

SEQ ID NO: 6050 - DNA, 34 bp, Artificial
  primer
ttttgtcggagtggtattggtatttttttaagat

SEQ ID NO: 6051 - DNA, 39 bp, Artificial
  primer
ggtttgtaggtgagtagtagtgtagtatttttgtttggt

SEQ ID NO: 6052 - DNA, 40 bp, Artificial
  primer
gtgtagtatttttgtttggtgagtttaatttgtttagttt

SEQ ID NO: 6053 - DNA, 37 bp, Artificial
  primer
ttaatttgtttagtttggtttttgttggagtggtatt

SEQ ID NO: 6054 - DNA, 38 bp, Artificial
  primer
tttatatgatgtttgatattttgttggttttgatagat

SEQ ID NO: 6055 - DNA, 37 bp, Artificial
  primer
gtagaaggtggtttttaataagtgttttattttgggt

SEQ ID NO: 6056 - DNA, 35 bp, Artificial
  primer
gtattcgcgtggatatagtggaggattttgtttat

SEQ ID NO: 6057 - DNA, 34 bp, Artificial
  primer
tagaaaaaggtattgtttaatgaggaggtggtgt

SEQ ID NO: 6058 - DNA, 30 bp, Artificial
  primer
attttttattgtggtttggttgagtcggtc

SEQ ID NO: 6059 - DNA, 28 bp, Artificial
  primer
tttttttttagcggtcgtattttgcgtc

SEQ ID NO: 6060 - DNA, 31 bp, Artificial
  primer
tgtcggagtggtatcggtatttttttaagac

SEQ ID NO: 6061 - DNA, 34 bp, Artificial
  primer
gtaggtgagtagtagcgtagtatttttgttcggc

SEQ ID NO: 6062 - DNA, 31 bp, Artificial
  primer
ttttgttcggcgagtttaatttgtttagttc

SEQ ID NO: 6063 - DNA, 31 bp, Artificial
  primer
tgtttagttcggtttttgtcggagtggtatc

SEQ ID NO: 6064 - DNA, 35 bp, Artificial
  primer
atatgatgttcgatattttgttggttttgatagac

SEQ ID NO: 6065 - DNA, 31 bp, Artificial
  primer
ggtggtttttaataagcgttttattttgggc

SEQ ID NO: 6066 - DNA, 31 bp, Artificial
  primer
tcgcgtggatatagtggaggatttcgtttac

SEQ ID NO: 6067 - DNA, 26 bp, Artificial
  primer
ggtattgtttaacgaggaggtggcgc

SEQ ID NO: 6068 - DNA, 64 bp, Artificial
  primer
gttaggtttcgttgtttttttttgtttttttttttttttagggaggctgctgtcctttcgatca

SEQ ID NO: 6069 - DNA, 68 bp, Artificial
  primer
gtattttatttggtttgtaggtgagtagtagcgtagtatttttgacagcgtgttcgttgcttgcatca

SEQ ID NO: 6070 - DNA, 57 bp, Artificial
  primer
gagtttaatttgtttagttcggtttttgttggattgcgggaactcacgaggtcgtat

SEQ ID NO: 6071 - DNA, 57 bp, Artificial
  primer
ggtttttgtcggagtggtattggtatttttttaatggcgatggtccactcgcaatca

SEQ ID NO: 6072 - DNA, 60 bp, Artificial
  primer
ggtatttttttaagacgtttttttttttgtaggatggcacggctcgataggtcaagcttt

SEQ ID NO: 6073 - DNA, 63 bp, Artificial
  primer
gtttttttttttgtaggatgaagaattttatgttggaggcatcgcacttcgctttggctgatt

SEQ ID NO: 6074 - DNA, 55 bp, Artificial
  primer
gatatggggtgtacgtagaaggtggtttttacaaggcacgtcccagacgcatcaa

SEQ ID NO: 6075 - DNA, 63 bp, Artificial
  primer
gttattgttaaagtggttagtatttgcgtggatatagtggcacgggagctgacgacgtgtcaa

SEQ ID NO: 6076 - DNA, 64 bp, Artificial
  primer
ggagttaatattttggttaattatttggacgagtttttttagacgcaccgcaacaggctgtcaa

SEQ ID NO: 6077 - DNA, 56 bp, Artificial
  primer
ggagggttgaaaagttgttgggttttatttttcatcgctgcaagtaccgcactcaa

What is claimed:

1. A method for determining the prognosis of a subject having colon cancer, said method comprising:
obtaining a biological sample from the subject;
detecting expression levels of at least five genes selected from a group of 176 genes informative of colon cancer prognosis consisting of ACSL4, RQCD1, AA058828*, AIP, AKR1A1, AP3D1, ARL2BP, ARL4A, ARL61P4, OGFOD2, ASNA1, ATP5B, C12orf52, C19orf36, C1GALT1, C1orf144, C5orf23, C6orf15, C7orf10, C8orf70, CALML4, CASP1, CCNA2, CCT2, CDC42BPA, AK023058*, CDR2L, CFB, CHST12, CLN5, CMPK1, CNOT7, CNPY2, COBL, COMMD4, COX5A, CXCL11, CYB561, CYB5B, DAZAP2, DDX23, DENND2A, DENND2D, DHX15, AL359599*, DND1, DOCK9, EGFR, ELP3, ERP29, ETV1, FAM82C, FDFT1, FKBP14, FLJ10357, FRYL, GALNS, GCHFR, GHITM, GLS, GPR177, GRB10, GREM2, GRHPR, GRP, GSR, GSTA1, H2AFZ, HOXB7, IFT88, IL15RA, ISG20, ITGAE, KIAA0746, SERINC2, KIF13B, KLC1, LAMP3, LANCL1, LAP3, LEPREL1, LL22NC03-5H6.5, LOC100131861, SAMM50, LRRC41, LRRC47, MAP4, MAPKAPK5, MCM5, MCRS1, METRN, METTL3, MFHAS1, MMP3, MOSPD1, MRPL46, MTUS1, MYRIP, N4BP2L2, NAB1, NAT1, NDUFC1, NISCH, NUMB, OGT, OSBPL3, PAM, PBK, PDGFA, PEBP1, PGDS, PIGR, PIGT, PRDM2, PRELP, PSMA5, PSMD9, PSPC1, PTHLH, R3HCC1, RP3-377H14.5, RPLP0, RPLP0-like, RPS27L, RTN2, RYK, SAV1, SCAMP1, SERPINA1, SF3B1, SFPQ, SGCD, SLC25A3, SLC39A8, SMG7, SMURF2, SORD, SOX4, SPATA5L1, SQRDL, SRP72, SSNA1, STK3, SYNGR1, TAPBPL, TEGT, TES, TLN1, TMCC1, TMEM106C, TMEM16A, TMEM33, TMEM87A, TNFRSF10B, TNFSF10, TNIK, TRIM36, U2AF2, UBE2L6, UCP2, UNC84A, UQCRFS1, UQCRH, USP12, USP3, VPS41, WARS, WDR1, WDR68, XPO7, YBX1, ZC3H7B, ZMYM2, ZMYM5, ZNF117, and ZNF430 in the biological sample;
comparing the detected expression levels of the at least five genes from the biological sample with expression levels of the corresponding at least five genes when associated with a good disease prognosis expression profile and when associated with a bad disease prognosis expression profile; and
determining the prognosis of the subject having colon cancer based on said comparing.

2. The method according to claim 1, wherein said good disease prognosis expression profile comprises: (1) genes having expression levels below that of an average tumor sample expression level that are selected from the group consisting of AK023058*, AIP, ARL2BP, C1GALT1, CDC42BPA, C8orf70, CLN5, COBL, CYB5B, MOSPD1, DOCK9, EGFR, FKBP14, DND1, GREM2, GPR177, GALNS, GRB10, GRP, GSTA1, RP3-377H14.5, HOXB7, ZNF117, TNIK, LANCL1, METRN, LEPREL1, NAB1, NISCH, OGT, OSBPL3, PDGFA, PRDM2, PRELP, PSPC1, RECQL, RYK, SMURF2, TLN1, UNC84A, USP12, ZMYM2, ZMYM5, AL359599*, ARL4A, N4BP2L2, GLS, C19orf36, TMCC1, METTL3, TMEM16A, RTN2, SCAMP1, SF3B1, SOX4, STK3, ZNF430, C6orf15, C7orf10, CHST12, ETV1, ACSL4, FLJ10357, C5orf23, AA058828*, CDR2L, KLC1, MAP4, NUMB, PAM, PGDS, PTHLH, ZC3H7B, SAV1, SGCD, SYNGR1, TES, IFT88, TRIM36 and VPS41; and (2) genes having expression levels above that of an average tumor sample expression level that are selected from the group consisting of SERPINA1, RPLP0, RPLP0-like, CYB561, AKR1A1, AP3D1, ARL6IP4, OGFOD2, ASNA1, CFB, ERP29, SMG7, CASP1, CCNA2, LOC100131861, SAMM50, COX5A, CXCL11, DAZAP2, DDX23, FDFT1, COMMD4, GCHFR, GRHPR, GSR, ISG20, ITGAE, KIAA0746, SERINC2, FRYL, LRRC47, LAMP3, R3HCC1, MAPKAPK5, MCM5, MCRS1, TMEM106C, MMP3, MTUS1, LRRC41, NAT1, NDUFC1, YBX1, PEBP1, PIGR, PSMA5, SFPQ, SLC25A3, SLC39A8, SQRDL, SRP72, SSNA1, TAPBPL, TEGT, PBK, UCP2, UQCRH, XPO7, CCT2, CNOT7, DHX15, TMEM87A, ELP3, FAM82C, LL22NC03-5H6.5, DENND2D, WDR68, IL15RA, DENND2A, KIF13B, MFHAS1, SPATA5L1, MYRIP, PIGT, PSMD9, RPS27L, TEGT, TNFRSF10B, UBE2L6, USP3, ATP5B, CALML4, C1orf144, TMEM33, C12orf52, GHITM, H2AFZ, LAP3, MRPL46, SORD, CNPY2, TNFSF10, U2AF2, CMPK1, UQCRFS1, WARS and WDR1.

3. The method according to claim 1, wherein said bad disease prognosis expression profile comprises: (1) genes having expression levels below that of an average tumor sample expression level that are selected from the group consisting of SERPINA1, RPLP0, RPLP0-like, CYB561, AKR1A1, AP3D1, ARL6IP4, OGFOD2, ASNA1, CFB, ERP29, SMG7, CASP1, CCNA2, LOC100131861, SAMM50, COX5A, CXCL11, DAZAP2, DDX23, FDFT1, COMMD4, GCHFR, GRHPR, GSR, ISG20, ITGAE, KIAA0746, SERINC2, FRYL, LRRC47, LAMP3, R3HCC1, MAPKAPK5, MCM5, MCRS1, TMEM106C, MMP3, MTUS1, LRRC41, NAT1, NDUFC1, YBX1, PEBP1, PIGR, PSMA5, SERPINA1, SFPQ, SLC25A3, SLC39A8, SQRDL, SRP72, SSNA1, TAPBPL, TEGT, PBK, UCP2, UQCRH, XPO7, CCT2, CNOT7, DHX15, TMEM87A, ELP3, FAM82C, LL22NC03-5H6.5, DENND2D, WDR68, IL15RA, DENND2A, KIF13B, MFHAS1, SPATA5L1, MYRIP, PIGT, PSMD9, RPS27L, TNFRSF10B, UBE2L6, USP3, ATP5B, CALML4, C1orf144, TMEM33, C12orf52, GHITM, H2AFZ, LAP3, MRPL46, SORD, CNPY2, TNFSF10, U2AF2, CMPK1, UQCRFS1, WARS and WDR1 and (2) genes having expression levels above that of an average tumor sample expression level that are selected from the group consisting of AK023058*, AIP, ARL2BP, C1GALT1, CDC42BPA, C8orf70, CLN5, COBL, CYB5B, MOSPD1, DOCK9, EGFR, FKBP14, DND1, GREM2, GPR177, GALNS, GRB10, GRP, GSTA1, RP3-377H14.5, HOXB7, ZNF117, TNIK, LANCL1, METRN, LEPREL1, NAB1, NISCH, OGT, OSBPL3, PDGFA, PRDM2, PRELP, PSPC1, RECQL, RYK, SMURF2, TLN1, UNC84A, USP12, ZMYM2, ZMYM5, AL359599*, ARL4A, N4BP2L2, GLS, C19orf36, TMCC1, METTL3, TMEM16A, RTN2, SCAMP1, SF3B1, SOX4, STK3, ZNF430, C6orf15, C7orf10, CHST12, ETV1, ACSL4, FLJ10357, C5orf23, AA058828*, CDR2L, KLC1, MAP4, NUMB, PAM, PGDS, PTHLH, ZC3H7B, SAV1, SGCD, SYNGR1, TES, IFT88, TRIM36, and VPS41.

4. The method according to claim 1, wherein said determining comprises:
calculating a percentage of genes having an expression level associated with a good disease prognosis expression profile and a percentage of genes having an expression level associated with a bad disease prognosis expression profile in the sample, wherein a favorable prognosis for the subject exists when greater than 30% of the genes have expression levels associated with a good disease prognosis expression profile and less than 30% of the genes have expression levels associated with a bad disease prognosis expression profile, and wherein an unfavorable prognosis for the subject exists when greater than 30% of the genes have expression levels associated with a bad disease prognosis expression profile and less than 30% of the genes have expression levels associated with a good disease prognosis expression profile.

5. The method according to claim 1, wherein the at least five genes are selected from a group of 71 genes informative of colon cancer prognosis consisting of SLC25A3, DAZAP2, TEGT, ERP29, PSMA5, DDX23, LOC100131861, SAMM50, SFPQ, NISCH, CYB5B, TMEM106C, EGFR, MCRS1, SERPINA1, CCNA2, NDUFC1, COX5A, GCHFR, ITGAE, PRDM2, PDGFA, GSR, GRP, COMMD4, XPO7, YBX1, SRP72, UCP2, SLC39A8, NAB1, WDR68, CXCL11, RECQL, CASP1, PTHLH, UNC84A, MTUS1, KIAA0746, SERINC2, DOCK9, FRYL, MAPKAPK5, LRRC47, RQCD1, TNIK, RPLP0, RPLP0-like, CLN5, NAT1, CDC42BPA, GSTA1, ZMYM5, RYK, PIGT, CMPK1, SQRDL, FAM82C, CNOT7, LL22NC03-5H6.5, PSPC1, TAPBPL, METRN, PBK, MRPL46, FKBP14, C1GALT1, GREM2, GPR177, DND1, and PRELP.

6. The method according to claim 1, wherein the biological sample comprises colon cancer cells.

7. The method according to claim 6, wherein the colon cancer cells are from a stage I, II, III, or IV colon cancer tumor.

8. The method according to claim 1, wherein said detecting the expression level comprises:
measuring RNA expression level or protein expression level.

9. The method according to claim 8, wherein protein expression level is measured using a protein hybridization assay.

10. The method according to claim 8, wherein RNA expression level is measured using a nucleic acid hybridization assay or a nucleic acid amplification assay.

11. The method according to claim 10, wherein the nucleic acid hybridization assay is carried out using an array comprising a plurality of nucleic acid probes.

12. The method according to claim 11, wherein said array comprises a plurality of nucleic acid probes, each nucleic acid probe comprising a nucleotide sequence that is complementary to at least a portion of a nucleotide sequence of a gene selected from the group of 176 genes informative of colon cancer outcome.

13. The method according to claim 11, wherein said array comprises a plurality of nucleic acid probes, each nucleic acid probe comprising a nucleotide sequence that is complementary to at least a portion of a nucleotide sequence of a gene selected from the group of 71 genes informative of colon cancer outcome.

14. The method according to claim 10, wherein the nucleic acid amplification assay is a semi-quantitative or quantitative real-time polymerase chain reaction (RT-PCR) assay.

15. The method according to claim 1 further comprising:
performing one or more additional analyses, wherein said additional analyses are selected from the group consisting of detecting microsatellite instability, measuring DNA promoter methylation level, screening one or more mutations in one or more colon cancer oncogenes or tumor suppressor genes in the sample, and combinations thereof and
determining the prognosis of the subject having colon cancer based on said comparing the detected gene expression level and said performing one or more additional analyses.

16. The method according to claim 15, wherein said performing comprises:
detecting microsatellite instability using an NCI 5-marker panel, wherein a favorable prognosis exists when a microsatellite instability-low status is detected.

17. The method according to claim 15, wherein said performing comprises:
measuring methylation level of the lecithin:retinol acyl transferase gene promoter nucleotide sequence, or region upstream thereof, wherein a favorable prognosis exists when an increase in the methylation level of the lecithin:retinol acyl transferase gene promoter nucleotide sequence, or region upstream thereof, is measured.

18. The method according to claim 15, wherein said performing comprises:
screening mutational status of one or more colon cancer oncogenes or tumor-suppressor genes selected from the group consisting of K-ras, B-raf, APC, p53, and PIK3CA, wherein an unfavorable prognosis exists when mutations in one or more of the colon cancer oncogenes or tumor suppressor genes are identified.

19. The method according to claim 1 further comprising:
preparing a personalized genomic profile for a colon cancer patient based on said determining.

20. The method according to claim 19 further comprising:
establishing a treatment plan for the colon cancer patient based on said personalized genomic profile.

21. The method according to claim 20, wherein the treatment plan comprises surgery, individual therapy, chemotherapy, or a combination thereof.

22. The method according to claim 20 further comprising:
treating said colon cancer patient based on the treatment plan.

23. A method for determining the prognosis of a subject having colon cancer, said method comprising:
obtaining a biological sample from the subject;
detecting the expression level of at least five genes selected from a group of 101 genes informative of colon cancer prognosis consisting of NARS, WDR1, WARS, CCT4, ATP5B, SORD, UBE2L6, PSME2, AIP, RRM2, LRRC41, CCT2, TAF9, HDAC5, SVIL, CCNB2, DBN1, PBX2, RFC5, IDE, MAD2L1, PSMA4, NDUFC1, IVD, PPIH, NEO1, CXCL10, FXN, GABBR1, ARHGAP8, LOC553158, HOXA4, COMMD4, DFFB, KLF12, GLMN, CASP7, PIR, ATP5G3, ACTN1, DDOST, TAPBP, RGL2, CYB561, TUSC3, C3orf63, GRB10, NR2F1, WDR68, CXCL2, CNPY2, CASP1, INDO, PFKM, CXCL11, MCAM, MAP2K5, MRPS11, NOLC1, CD59, CAMSAP1L1, SHANK2, KLC1, EMP1, C1orf95, GMDS, RPLP0, RPLP0-like, PDLIM4, PAM, TM4SF1, BEX4, ADORA1, FAM48A, ITM2B, PREB, CMPK1, LAP3, FAM82C, AACS, RP5-1077B9.4, NUP37, RHBDF1, PBK, TIPIN, TMEM204, ALG6, NPR3, SCD5, FLJ13236, GPATCH4, GREM2, RPL22, KLHL3, C15orf44, USP3, TNS1, ZBTB20, RTN2, FLJ10357, and CALML4, in the biological sample;
comparing the detected expression level of the at least five genes from the biological sample with expression levels of the corresponding at least five genes when associated with a good disease prognosis expression profile and when associated with a bad disease prognosis expression profile; and
determining the prognosis of the subject having colon cancer based on said comparing.

24. The method according to claim 23, wherein said good disease prognosis expression profile comprises: (1) genes having expression levels below that of an average tumor sample expression level that are selected from the group consisting of ACTN1, ADORA1, ARHGAP8, LOC553158, BEX4, C1orf95, C3orf63, CAMSAP1L1, CD59, CNPY2, DBN1, FAM48A, FLJ10357, GPATCH4, GRB10, GREM2, HDAC5, HOXA4, ITM2B, KLC1, KLF12, KLHL3, NPR3, PAM, PBX2, PDLIM4, PIR, RGL2, RHBDF1, RP5-1077B9.4, RTN2, SCD5, SHANK2, SVIL, TAPBP, TIPIN, TM4SF1, TMEM204, TNS1, TUSC3, and ZBTB20 and (2) genes having expression levels above that of an average tumor sample expression level that are selected from the group consisting of NARS, WDR1, WARS, CCT4, ATP5B, SORD, UBE2L6, PSME2, AIP, RRM2, LRRC41, CCT2, TAF9, CCNB2, RFC5, IDE, MAD2L1, PSMA4, NDUFC1, IVD, PPIH, NEO1, CXCL10, FXN, GABBR1, COMMD4, DFFB, GLMN, CASP7, ATP5G3, DDOST, CYB561, NR2F1, WDR68, CXCL2, CASP1, INDO, PFKM, CXCL11, MCAM, MAP2K5, MRPS11, NOLC1, EMP1, GMDS, RPLP0, RPLP0-like, PREB, CMPK1, LAP3, FAM82C, AACS, NUP37, PBK, ALG6, FLJ13236, RPL22, C15orf44, USP3, and CALML4.

25. The method according to claim 23, wherein said bad disease prognosis expression profile comprises: (1) genes having expression levels below that of an average tumor sample expression level that are selected from the group consisting of NARS, WDR1, WARS, CCT4, ATP5B, SORD, UBE2L6, PSME2, AIP, RRM2, LRRC41, CCT2, TAF9, CCNB2, RFC5, IDE, MAD2L1, PSMA4, NDUFC1, IVD, PPIH, NEO1, CXCL10, FXN, GABBR1, COMMD4, DFFB, GLMN, CASP7, ATP5G3, DDOST, CYB561, NR2F1, WDR68, CXCL2, CASP1, INDO, PFKM, CXCL11, MCAM, MAP2K5, MRPS11, NOLC1, EMP1, GMDS, RPLP0, RPLP0-like, PREB, CMPK1, LAP3, FAM82C, AACS, NUP37, PBK, ALG6, FLJ13236, RPL22, C15orf44, USP3, and CALML4 and (2) genes having expression levels above that of an average tumor sample expression level that are selected from the group consisting of ACTN1, ADORA1, ARHGAP8, LOC553158, BEX4, C1orf95, C3orf63, CAMSAP1L1, CD59, CNPY2, DBN1, FAM48A, FLJ10357, GPATCH4, GRB10, GREM2, HDAC5, HOXA4, ITM2B, KLC1, KLF12, KLHL3, NPR3, PAM, PBX2, PDLIM4, PIR, RGL2, RHBDF1, RP5-1077B9.4, RTN2, SCD5, SHANK2, SV1L, TAPBP, TIPIN, TM4SF1, TMEM204, TNS1, TUSC3, and ZBTB20.

26. The method according to claim 23, wherein said determining comprises:
calculating a percentage of genes having an expression level associated with a good disease prognosis expression profile and a percentage of genes having an expression level associated with a bad disease prognosis expression profile in the sample, wherein a favorable prognosis for the subject is determined when greater than 30% of the genes have expression levels associated with a good disease prognosis expression profile and less than 30% of the genes have expression levels associated with a bad disease prognosis expression profile, and wherein an unfavorable prognosis for the subject is determined when greater than 30% of the genes have expression levels associated with a bad disease prognosis expression profile and less than 30% of the genes have expression levels associated with a good disease prognosis expression profile.

27. The method according to claim 23, wherein the biological sample comprises colon cancer cells.

28. The method according to claim 27, wherein the colon cancer cells are collected from a stage I, II, III, or IV colon cancer tumor.

29. The method according to claim 23, wherein said detecting the expression level comprises:
measuring RNA expression level or protein expression level.

30. The method according to claim 29, wherein protein expression level is measured using a protein hybridization assay.

31. The method according to claim 29, wherein RNA expression level is measured using a nucleic acid hybridization assay or a nucleic acid amplification assay.

32. The method according to claim 31, wherein the nucleic acid hybridization assay is carried out using an array comprising a plurality of nucleic acid probes.

33. The method according to claim 32, wherein said array comprises a plurality of nucleic acid probes, each nucleic acid probe comprising a nucleotide sequence that is complementary to at least a portion of a nucleotide sequence of a gene selected from the group of 101 genes informative of colon cancer outcome.

34. The method according to claim 31, wherein the nucleic acid amplification assay is a semi-quantitative or quantitative real-time polymerase chain reaction (RT-PCR) assay.

35. The method according to claim 23 further comprising:
preparing a personalized genomic profile for a colon cancer patient based on said determining.

36. The method according to claim 35 further comprising:
establishing a treatment plan for the colon cancer patient based on said personalized genomic profile.

37. The method according to claim 36, wherein the treatment plan comprises surgery, individual therapy, chemotherapy, or a combination thereof.

38. The method according to claim 36 further comprising:
treating said colon cancer patient based on the treatment plan.

39. A method of identifying an agent that improves the prognosis of a subject having colon cancer, said method comprising:
administering an agent to the subject having colon cancer;
obtaining a first biological sample from the subject before said administering and a second biological sample from the subject after said administering;
detecting the expression level of at least five genes selected from a group of 176 genes informative of colon cancer prognosis consisting of SLC25A3, WDR1, WARS, DAZAP2, TEGT, H2AFZ, SF3B1, ERP29, PSMA5, ATP5B, DHX15, SOX4, DDX23, SORD, LOC100131861, SAMM50, SFPQ, NISCH, CYB5B, UBE2L6, MCM5, TMEM106C, AIP, SMG7, AKR1A1, LRRC41, CCT2, EGFR, LANCL1, ASNA1, ARL2BP, UQCRH, N4BP2L2, CFB, ACSL4, MCRS1, TNFSF10, TES, ZMYM2, SERPINA1, KIF13B, TLN1, CCNA2, NDUFC1, COX5A, STK3, PIGR, SYNGR1, IFT88, HOXB7, GCHFR, ARL4A, ITGAE, PRDM2, C8orf70, PEBP1, PDGFA, LAMP3, SMURF2, GSR, MMP3, ZC3H7B, GRP, GALNS, COMMD4, PGDS, ZNF430, IL15RA, OGT, ZNF117, PSMD9, XPO7, YBX1, SRP72, UQCRFS1, UCP2, NUMB, GHITM, SLC39A8, NAB1, TNFRSF10B, GRB10, WDR68, OSBPL3, CNPY2, CXCL11, SSNA1, RECQL, VPS41, FDFT1, AP3D1, CASP1, PTHLH, C1orf144, UNC84A, MTUS1, TMEM87A, KIAA0746, SERINC2, SCAMP1, DOCK9, FRYL, R3HCC1, MAPKAPK5, LRRC47, PAM, COBL, TNIK, CDR2L, USP12, TMCC1, MFHAS1, METTL3, KLC1, MYRIP, RPLP0, RPLP0-like, CLN5, C19orf36, NAT1, CDC42BPA, SGCD, GSTA1, AL359599*, ZMYM5, GRHPR, RYK, CYB561, PIGT, CMPK1, LAP3, SQRDL, RPS27L, FAM82C, CNOT7, LL22NC03-5H6.5, SAV1, PSPC1, U2AF2, TMEM33, LEPREL1, TAPBPL, TMEM16A, MOSPD1, CHST12, METRN, C5orf23, PBK, MRPL46, FKBP14, C1GALT1, C7orf10, TRIM36, ARL6IP4, OGFOD2, GREM2, DENND2D, ELP3, C6orf15, GLS, USP3, C12orf52, ETV1, GPR177, AA058828*, DND1, AK023058*, SPATA5L1, RP3-377H14.5, MAP4, ISG20, RTN2, PRELP, DENND2A, FLJ10357, and CALML4;
determining increases or decreases in the expression levels of the at least five genes in the second sample compared to the first sample; and
identifying an agent that improves the prognosis of a subject having colon cancer based on said determining.

40. The method according to claim 39, wherein an agent that increases the expression level of any one or more genes selected from the group consisting of SERPINA1, RPLP0, RPLP0-like, CYB561, AKR1A1, AP3D1, ARL6IP4, OGFOD2, ASNA1, CFB, ERP29, SMG7, CASP1, CCNA2, LOC100131861, SAMM50, COX5A, CXCL11, DAZAP2, DDX23, FDFT1, COMMD4, GCHFR, GRHPR, GSR, ISG20, ITGAE, KIAA0746, SERINC2, FRYL, LRRC47, LAMP3, R3HCC1, MAPKAPK5, MCM5, MCRS1, TMEM106C, MMP3, MTUS1, LRRC41, NAT1, NDUFC1, YBX1, PEBP1, PIGR, PSMA5, SFPQ, SLC25A3, SLC39A8, SQRDL, SRP72, SSNA1, TAPBPL, TEGT, PBK, UCP2, UQCRH, XPO7, CCT2, CNOT7, DHX15, TMEM87A, ELP3, FAM82C, LL22NC03-5H6.5, DENND2D, WDR68, IL15RA, DENND2A, KIF13B, MFHAS1, SPATA5L1, MYRIP, PIGT, PSMD9, RPS27L, TNFRSF10B, UBE2L6, USP3, ATP5B, CALML4, C1orf144, TMEM33, C12orf52, GHITM, H2AFZ, LAP3, MRPL46, SORD, CNPY2, TNFSF10, U2AF2, CMPK1, UQCRFS1, WARS, and WDR1, and/or decreases the expression level of any one or more genes selected from the group consisting of AK023058*, AIP, ARL2BP, C1GALT1, CDC42BPA, C8orf70, CLN5, COBL, CYB5B, MOSPD1, DOCK9, EGFR, FKBP14, DND1, DND1, GREM2, GPR177, GALNS, GRB10, GRP, GSTA1, RP3-377H14.5, HOXB7, ZNF117, TNIK, LANCL1, METRN, LEPREL1, NAB1, NISCH, OGT, OSBPL3, PDGFA, PRDM2, PRELP, PSPC1, RECQL, RYK, SMURF2, TLN1, UNC84A, USP12, ZMYM2, ZMYM5, AL359599*, ARL4A, N4BP2L2, GLS, C19orf36, TMCC1, METTL3, TMEM16A, RTN2, SCAMP1, SF3B1, SOX4, STK3, ZNF430, C6orf15, C7orf10, CHST12, ETV1, ACSL4, FLJ10357, C5orf23, AA058828*, CDR2L, KLC1, MAP4, NUMB, PAM, PGDS, PTHLH, ZC3H7B, SAV1, SGCD, SYNGR1, TES, IFT88, TRIM36, and VPS41 is identified as an agent that improves the prognosis of a subject having colon cancer.

41. The method according to claim 39, wherein the at least five genes are selected from a group of 71 genes informative of colon cancer prognosis consisting of SLC25A3, DAZAP2, TEGT, ERP29, PSMA5, DDX23, LOC100131861, SAMM50, SFPQ, NISCH, CYB5B, TMEM106C, EGFR, MCRS1, SERPINA1, CCNA2, NDUFC1, COX5A, GCHFR, ITGAE, PRDM2, PDGFA, GSR, GRP, COMMD4, XPO7, YBX1, SRP72, UCP2, SLC39A8, NAB1, WDR68, CXCL11, RECQL, CASP1, PTHLH, UNC84A, MTUS1, KIAA0746, SERINC2, DOCK9, FRYL, MAPKAPK5, LRRC47, RQCD1, TNIK, RPLP0, RPLP0-like, CLN5, NAT1, CDC42BPA, GSTA1, ZMYM5, RYK, PIGT, CMPK1, SQRDL, FAM82C, CNOT7, LL22NC03-5H6.5, PSPC1, TAPBPL, METRN, PBK, MRPL46, FKBP14, C1GALT1, GREM2, GPR177, DND1, and PRELP.

42. The method according to claim 39, wherein the biological sample comprises colon cancer cells.

43. The method according to claim 42, wherein the colon cancer cells are from a stage I, II, III, or IV colon cancer tumor.

44. The method according to claim 39, wherein said detecting the expression level comprises:
measuring RNA expression level or protein expression level.

45. The method according to claim 44, wherein protein expression level is detected using a protein hybridization assay.

46. The method according to claim 44, wherein RNA expression level is detected using a nucleic acid hybridization assay or a nucleic acid amplification assay.

47. The method according to claim 46, wherein the nucleic acid hybridization assay is carried out using an array comprising a plurality of nucleic acid probes.

48. The method according to claim 47, wherein said array comprises a plurality of nucleic acid probes, each nucleic acid probe comprising a nucleotide sequence that is complementary to at least a portion of a nucleotide sequence of a gene selected from the group of 176 genes informative of colon cancer outcome consisting of SLC25A3, WDR1, WARS, DAZAP2, TEGT, H2AFZ, SF3B1, ERP29, PSMA5, ATP5B, DHX15, SOX4, DDX23, SORD, LOC100131861, SAMM50, SFPQ, NISCH, CYB5B, UBE2L6, MCM5, TMEM106C, AIP, SMG7, AKR1A1, LRRC41, CCT2, EGFR, LANCL1, ASNA1, ARL2BP, UQCRH, N4BP2L2, CFB, ACSL4, MCRS1, TNFSF10, TES, ZMYM2, SERPINA1, KIF13B, TLN1, CCNA2, NDUFC1, COX5A, STK3, PIGR, SYNGR1, IFT88, HOXB7, GCHFR, ARL4A, ITGAE, PRDM2, C8orf70, PDGFA, LAMP3, SMURF2, GSR, MMP3, ZC3H7B, GRP, GALNS, COMMD4, PGDS, ZNF430, IL15RA, OGT, ZNF117, PSMD9, XPO7, YBX1, SRP72, UQCRFS1, UCP2, NUMB, GHITM, SLC39A8, NAB1, TNFRSF10B, GRB10, WDR68, OSBPL3, CNPY2, CXCL11, SSNA1, RECQL, VPS41, FDFT1, AP3D1, CASP1, PTHLH, PEBP1, C1orf144, UNC84A, MTUS1, TMEM87A, KIAA0746, SERINC2, SCAMP1, DOCK9, FRYL, R3HCC1, MAPKAPK5, LRRC47, PAM, COBL, TNIK, CDR2L, USP12, TMCC1, MFHAS1, METTL3, KLC1, MYRIP, RPLP0, RPLP0-like, CLN5, C19orf36, NAT1, CDC42BPA, SGCD, GSTA1, AL359599*, ZMYM5, GRHPR, RYK, CYB561, PIGT, CMPK1, LAP3, SQRDL, RPS27L, FAM82C, CNOT7, LL22NC03-5H6.5, SAV1, PSPC1, U2AF2, TMEM33, LEPREL1, TAPBPL, TMEM16A, MOSPD1, CHST12, METRN, C5orf23, PBK, MRPL46, FKBP14, C1GALT1, C7orf10, TRIM36, ARL6IP4, OGFOD2, GREM2, DENND2D, ELP3, C6orf15, GLS, USP3, C12orf52, ETV1, GPR177, AA058828*, DND1, AK023058*, SPATA5L1, RP3-377H14.5, MAP4, ISG20, RTN2, PRELP, DENND2A, FLJ10357, and CALML4.

49. The method according to claim 47, wherein said array comprises a plurality of nucleic acid probes, each nucleic acid probe comprising a nucleotide sequence that is complementary to at least a portion of a nucleotide sequence of a gene selected from a group of 71 genes informative of colon cancer outcome consisting of SLC25A3, DAZAP2, TEGT, ERP29, PSMA5, DDX23, LOC100131861, SAMM50, SFPQ, NISCH, CYB5B, TMEM106C, EGFR, MCRS1, SERPINA1, CCNA2, NDUFC1, COX5A, GCHFR, ITGAE, PRDM2, PDGFA, GSR, GRP, COMMD4, XPO7, YBX1, SRP72, UCP2, SLC39A8, NAB1, WDR68, CXCL11, RECQL, CASP1, PTHLH, UNC84A, MTUS1, KIAA0746, SERINC2, DOCK9, FRYL, MAPKAPK5, LRRC47, RQCD1, TNIK, RPLP0, RPLP0-like, CLN5, NAT1, CDC42BPA, GSTA1, ZMYM5, RYK, PIGT, CMPK1, SQRDL, FAM82C, CNOT7, LL22NC03-5H6.5, PSPC1, TAPBPL, METRN, PBK, MRPL46, FKBP14, C1GALT1, GREM2, GPR177, DND1, and PRELP.

50. The method according to claim 46, wherein the nucleic acid amplification assay is a semi-quantitative or quantitative real-time polymerase chain reaction (RT-PCR) assay.

51. A collection of 71 genes having expression levels informative for predicting a prognosis of a patient having colon cancer, said collection of genes comprising: SLC25A3, DAZAP2, TEGT, ERP29, PSMA5, DDX23, LOC100131861, SAMM50, SFPQ, NISCH, CYB5B, TMEM106C, EGFR, MCRS1, SERPINA1, CCNA2, NDUFC1, COX5A, GCHFR, ITGAE, PRDM2, PDGFA, GSR, GRP, COMMD4, XPO7, YBX1, SRP72, UCP2, SLC39A8, NAB1, WDR68, CXCL11, RECQL, CASP1, PTHLH, UNC84A, MTUS1, KIAA0746, SERINC2, DOCK9, FRYL, MAPKAPK5, LRRC47, RQCD1, TNIK, RPLP0, RPLP0-like, CLN5, NAT1, CDC42BPA, GSTA1, ZMYM5, RYK, PIGT, CMPK1, SQRDL, FAM82C, CNOT7, LL22NC03-5H6.5, PSPC1, TAPBPL, METRN, PBK, MRPL46, FKBP14, C1GALT1, GREM2, GPR177, DND1, and PRELP

52. The collection of genes according to claim 51, wherein said collection further comprises AA058828*, ACSL4, AIP, AK023058*, AKR1A1, AL359599*, AP3D1, ARL2BP, ARL4A, ARL6IP4, OGFOD2, ASNA1, ATP5B, C12orf52, C19orf36, C1orf144, C5orf23, C6orf15, C7orf10, C8orf70, CALML4, CCT2, CDR2L, CFB, CHST12, CNPY2, COBL, CYB561, DENND2A, DENND2D, DHX15, DND1, ELP3, ETV1, FDFT1, FLJ10357, GALNS, GHITM, GLS, GRB10, GRHPR, H2AFZ, HOXB7, IFT88, IL15RA, ISG20, KIAA0746, SERINC2, KIF13B, KLC1, LAMP3, LANCL1, LAP3, LEPREL1, LRRC41, MAP4, MCM5, METTL3, MFHAS1, MMP3, MOSPD1, MYRIP, N4BP2L2, NUMB, OGT, OOSBPL3, PAM, PEBP1, PGDS, PIGR, PSMD9, R3HCC1, RP3-377H14.5, RPS27L, RTN2, SAV1, SCAMP1, SF3B1, SGCD, SLC39A8, SMG7, SMURF2, SORD, SOX4, SPATA5L1, SSNA1, STK3, SYNGR1, TEGT, TES, TLN1, TMCC1, TMEM16A, TMEM33, TMEM87A, TNFRSF10B, TNFSF10, TRIM36, U2AF2, UBE2L6, UCP2, UQCRFS1, UQCRH, USP12, USP3, VPS41, WARS, WDR1, ZC3H7B, ZMYM2, ZNF117, and ZNF430.

53. An array comprising a plurality of nucleic acid probes, each nucleic acid probe comprising a nucleotide sequence that is complementary to at least a portion of a nucleotide sequence of a gene selected from the collection of genes of claim 51.

54. A collection of 101 genes having expression levels informative for predicting a prognosis of a patient having colon cancer, said collection of genes comprising: AACS, ACTN1, ADORA1, AIP, ALG6, ARHGAP8, LOC553158, ATP5B, ATP5G3, BEX4, C15orf44, C1orf95, C3orf63, CALML4, CAMSAP1L1, CASP1, CASP7, CCNB2, CCT2, CCT4, CD59, CMPK1, CNPY2, COMMD4, CXCL10, CXCL11, CXCL2, CYB561, DBN1, DDOST, DFFB, EMP1, FAM48A, FAM82C, FLJ10357, FLJ13236, FXN, GABBR1, GLMN, GMDS, GPATCH4, GRB10, GREM2, HDAC5, HOXA4, IDE, INDO, ITM2B, IVD, KLC1, KLF12, KLHL3, LAP3, LRRC41, MAD2L1, MAP2K5, MCAM, MRPS11, NARS, NDUFC1, NEO1, NOLC1, NPR3, NR2F1, NUP37, PAM, PBK, PBX2, PDLIM4, PFKM, PIR, PPIH, PREB, PSMA4, PSME2, RFC5, RGL2, RHBDF1, RP5-1077B9.4, RPL22, RPLP0, RPLP0-like, RRM2, RTN2, SCD5, SHANK2, SORD, SVIL, TAF9, TAPBP, TIPIN, TM4SF1, TMEM204, TNS1, TUSC3, UBE2L6, USP3, WARS, WDR1, WDR68, and ZBTB20.

55. An array comprising a plurality of nucleic acid probes, each nucleic acid probe comprising a nucleotide sequence that is complementary to at least a portion of a nucleotide sequence of a gene selected from the group consisting of the collection of genes of claim 54.

56. A method for determining a subject's predisposition to having colon cancer, said method comprising:
obtaining a biological sample from the subject;
detecting the expression level of at least five genes selected from a collection of 176 genes informative of colon cancer predisposition consisting of ACSL4, RQCD1, AA058828*, AIP, AKR1A1, AP3D1, ARL2BP, ARL4A, ARL6IP4, OGFOD2, ASNA1, ATP5B, C12orf52, C19orf36, C1GALT1, C1orf144, C5orf23, C6orf15, C7orf10, C8orf70, CALML4, CASP1, CCNA2, CCT2, CDC42BPA, AK023058*, CDR2L, CFB, CHST12, CLN5, CMPK1, CNOT7, CNPY2, COBL, COMMD4, COX5A, CXCL11, CYB561, CYB5B, DAZAP2, DDX23, DENND2A, DENND2D, DHX15, AL359599*, DND1, DOCK9, EGFR, ELP3, ERP29, ETV1, FAM82C, FDFT1, FKBP14, FLJ10357, FRYL, GALNS, GCHFR, GHITM, GLS, GPR177, GRB10, GREM2, GRHPR, GRP, GSR, GSTA1, H2AFZ, HOXB7, IFT88, IL15RA, ISG20, ITGAE, KIAA0746, SERINC2, KIF13B, KLC1, LAMP3, LANCL1, LAP3, LEPREL1, LL22NC03-5H6.5, LOC100131861, SAMM50, LRRC41, LRRC47, MAP4, MAPKAPK5, MCM5, MCRS1, METRN, METTL3, MFHAS1, MMP3, MOSPD1, MRPL46, MTUS1, MYRIP, N4BP2L2, NAB1, NAT1, NDUFC1, NISCH, NUMB, OGT, OSBPL3, PAM, PBK, PDGFA, PEBP1, PGDS, PIGR, PIGT, PRDM2, PULP, PSMA5, PSMD9, PSPC1, PTHLH, R3HCC1, RP3-377H14.5, RPLP0, RPLP0-like, RPS27L, RTN2, RYK, SAV1, SCAMP1, SERPINA1, SF3B1, SFPQ, SGCD, SLC25A3, SLC39A8, SMG7, SMURF2, SORD, SOX4, SPATA5L1, SQRDL, SRP72, SSNA1, STK3, SYNGR1, TAPBPL, TEGT, TES, TLN1, TMCC1, TMEM106C, TMEM16A, TMEM33, TMEM87A, TNFRSF10B, TNFSF10, TNIK, TRIM36, U2AF2, UBE2L6, UCP2, UNC84A, UQCRFS1, UQCRH, USP12, USP3, VPS41, WARS, WDR1, WDR68, XPO7, YBX1, ZC3H7B, ZMYM2, ZMYM5, ZNF117, and ZNF430;
comparing the detected expression level of the at least five genes from said sample with the expression levels of the corresponding at least five genes when associated with a having a predisposition to colon cancer; and
determining the subject's predisposition to having colon cancer based on said comparing.
